United States Patent Application Publication US 2007/0059710 A1 - sequence listing, part 10

SEQ ID NO: 48845 - DNA, 201 bp, Homo sapiens
aaggaatggtaccagttcctccttgtacctctggtagaatttggctgtgaatccatctggtcctggactctttttggttggtaagctattgattattgccmcaatttcagctcctgttattggtctattcagagattcaacttcttcctggtttagtcttggaagagtgtatgtgtcgaggaatttatccatttctcctag

SEQ ID NO: 48846 - DNA, 201 bp, Homo sapiens
tatgccatgcagaacaatactgaaaacataatcttggtgcttgaaacagctatcctagaataatgacatatatgctagatgttcaataaatatttgttgartgagtatgagaaaaagatagataaaacacaaaagaaatgctaccatgatttttgttttcctttttctgggatgtactgttagaagagaagagagcaagac

SEQ ID NO: 48847 - DNA, 201 bp, Homo sapiens
ctggactctttttggttggtaagctattgattattgccccaatttcagctcctgttattggtctattcagagattcaacttcttcctggtttagtcttggragagtgtatgtgtcgaggaatttatccatttctcctagattttctagtttatttgcatagaggtgtttgtagtattctctggtggtagtttgtatttctg

SEQ ID NO: 48848 - DNA, 201 bp, Homo sapiens
aagactgataatacatgtcagtttttatttttggatggggagatgaagaaaagttacaagagaaagaaaggatacaactaccttgagagggcaggataaakaagatggattgaatttgttctggatttttgttttttacttcatgggttctttctaggtctccaggtctccccagccttagtttaggttggtgtattttta

SEQ ID NO: 48849 - DNA, 201 bp, Homo sapiens
agtattttatttctccttcacttatgaagcttagtttggctggatatgaaattctaggttgaaaattcttttctttaagaatgttgaatattggcccccastctcttctggcttgtagagtttctgccgagagatccgctgttagtctgatgggcttccctttgtgggtaacccgacctttctctctggctgcccttaaca

SEQ ID NO: 48850 - DNA, 201 bp, Homo sapiens
ttccttcatttcaactttggtgaatctgacaattatgtgtcttggagttggtcttctcgaggagtacctttgtggcgttctctgtatttcctgaatctcartgttggcctgccttgctagattggggaagttctcctggataatatcctgcagagtgttttccaacttggttccattctccccgtcactttcaggtacacc

SEQ ID NO: 48851 - DNA, 201 bp, Homo sapiens
tttccaacttggttccattctccccgtcactttcaggtacaccaagcagacgcagatttggtcttttcacatagtcccatatttcttggaggctttgttcrtttctttttattcttttttctctaaacttcccttcttgcttcatttcattcatttcatcttccatcactgatacccttccttccagctgatcgcatcggc

SEQ ID NO: 48852 - DNA, 201 bp, Homo sapiens
acttgatgccttttgatgaccgccacctcaaatcatgagtgcttaaaagtacgcctttcttagagcaagtgctttcatcagctaggactctttttcatgcrtgtgggttgagctttctctttctggggaggatttttaagtaagtcttaggccctccagaagttccgtcctttctctgccattcagagtttcccgactccc

SEQ ID NO: 48853 - DNA, 201 bp, Homo sapiens
taccttcatctatttttatcagtattgagaagtggcccaagtattatgttggaaataacagagaaactactaaagtttgtaaactactaaagtttgatatrtatcatgataaattagagaaaattctagtttttctcataataacagttctgtccctcacttcattctgacatactttttcatggagtaaagagcttgaag

SEQ ID NO: 48854 - DNA, 201 bp, Homo sapiens
atctatttttatcagtattgagaagtggcccaagtattatgttggaaataacagagaaactactaaagtttgtaaactactaaagtttgatatgtatcatkataaattagagaaaattctagtttttctcataataacagttctgtccctcacttcattctgacatactttttcatggagtaaagagcttgaagttaccgc

SEQ ID NO: 48855 - DNA, 201 bp, Homo sapiens
ggttccactaatcttgagctgttttggatttgttttttgttgtatttttaatttaatagagttttaatctaagcagtttaaaacctcttatgtgcttatasgtcttttttagtatacatattttatttgtgttgcttgtcttcaggtagataaattataataatgatgtgaaaaataaactgtgccatcggacccactgga

SEQ ID NO: 48856 - DNA, 201 bp, Homo sapiens
aattccaagagaaatataacaagaacaaaccacagaccatccttggaagtaagtgatgtagaaaacgacaagaacttttaaaaatttaatacatactatayatttttccattataaaaatatctccttttgttttctcatttatccagttatttcttctttcataacatatgcttggcatgatttttagttctataaagtc

SEQ ID NO: 48857 - DNA, 201 bp, Homo sapiens
ttgcatatgagttagaataaaaagctgatctcaactgctttggttttcagtaaacgaaaccttatctttagacggtatatttaaagacaaggctacttgartgaagtttgatactatccagaaggtaacagttagaaccaggcaatttaggttgagtctactcactaaatatatgaaaattccagtggatagacttatatg

SEQ ID NO: 48858 - DNA, 201 bp, Homo sapiens; identical to SEQ ID NO: 4930

SEQ ID NO: 48859 - DNA, 201 bp, Homo sapiens
tatgaaaattaactcttcttatgctgtccttcaagacttcatttgagctttgtttaaaagcagttatttattggttctgtatgttagggcattagtgttaygaagaatagggatgactctagtgaaaagtatccaaaaagatagagctaattttctgcacttctgaaaatgtttgctgtcccttgctgatgctaacttagt

SEQ ID NO: 48860 - DNA, 201 bp, Homo sapiens
aatgatacaatatggttgagtatgcatttcagactaacatatgactgccagtttgtgtgccttagttttcattttattgttctgtgtcttgtagagcaaaragcttacagcttatcggagccaccaagagaaaacaggtacttttaactattccaattttcctgaggaactgcatgatccttctttggaaatgtccacaca

SEQ ID NO: 48861 - DNA, 201 bp, Homo sapiens
tgtctttttgtttgtctgtgccctgcccccagcggtggagcctacagaggcaggcaggcctccttgagctgtggtgggctctacccacttggagcttcccygctgctttgtttacctaagcgagcctgggcaatggtgggcgcccctcccccagcctcgctgcagacttgcagtttgatctcagactgctgtgctagcaat

SEQ ID NO: 48862 - DNA, 201 bp, Homo sapiens
ctagtcaaaaaaccttatttattgtttacttcatgataagcaatttctacaggggagaaaagaaagtcagagaataggcggtgataagaaagtggattgaraataggatatatacacttaaaagagtggtcaaggctagataaaattattcaaaccctccagagctttcacagcttttatcattgacagtaacacaacatc

SEQ ID NO: 48863 - DNA, 201 bp, Homo sapiens
cggtggagcctacagaggcaggcaggcctccttgagctgtggtgggctctacccacttggagcttccctgctgctttgtttacctaagcgagcctgggcawtggtgggcgcccctcccccagcctcgctgcagacttgcagtttgatctcagactgctgtgctagcaatcagcgagactccgtgggtgtaggaccctccga

SEQ ID NO: 48864 - DNA, 201 bp, Homo sapiens
tgtcgtgttgtagaagtatgaaggatatatgataaattgtgcatttgtaagtttttaatcaatgtggaaactgtcgttttttatatagtcttctgtaacargggagttgggagtagagttgggtaaccaataattaattttcttttatttgcaatagtttagttgtgttcctgctgggaagtacaaaaggggcttcttgac

SEQ ID NO: 48865 - DNA, 201 bp, Homo sapiens
ggagcctacagaggcaggcaggcctccttgagctgtggtgggctctacccacttggagcttccctgctgctttgtttacctaagcgagcctgggcaatggygggcgcccctcccccagcctcgctgcagacttgcagtttgatctcagactgctgtgctagcaatcagcgagactccgtgggtgtaggaccctccgagcca

SEQ ID NO: 48866 - DNA, 201 bp, Homo sapiens
tctcagcagttagtataatttccactttccctttgaaatcacttaccttagattttatttacacatatttcttatggaatattgctaaagcccagaatatmacatttaggtgttatggtgtccctctgtgtgcagtccttatattctgatggaaaatgtagagactttgctcagatgatttctataagaaagttggctcac

SEQ ID NO: 48867 - DNA, 201 bp, Homo sapiens
gctctacccacttggagcttccctgctgctttgtttacctaagcgagcctgggcaatggtgggcgcccctcccccagcctcgctgcagacttgcagtttgwtctcagactgctgtgctagcaatcagcgagactccgtgggtgtaggaccctccgagccaggtgtgggatataatatcctggtgcgccgtttcctaagccc

SEQ ID NO: 48868 - DNA, 201 bp, Homo sapiens
atcattgtccacatatttggtgattgcctaagattaaattctagaatcagtatgagtaggtcaaagtgtgtatttgatttcctcttttacccacaactttktttagaagtaatttcaaaatttacagttactttttggcggggggagagggtggtttaaactttgcttattcatattaaggtttttacatggagcaatacc

SEQ ID NO: 48869 - DNA, 201 bp, Homo sapiens
caattttccaggtgccgtctgtcacccctttccttgaccaggaaagggaactccctgaccccttgcacttcccaagtgaggcaatgcctcgccctgcttcrgctcacgcatggtgtgctgcacccactgtcctgcgcccactgtctggcactccctagtgagatgaacccggtacctcagatggaaatgcagaaatcaccc

SEQ ID NO: 48870 - DNA, 201 bp, Homo sapiens
ttagcttggcgtggtggtatgcacttgtagtcccagctatttgtgggctgaggtgggcagatcgcctgagcctgggaggttgaggttgcagtgagccgagwtccttctcctgcactccagcctgggtgggcatcagaagtggcaccctgcctcaaaaaaaaaagttgtacagtttgttgttttacatttaagtgtgtgttg

SEQ ID NO: 48871 - DNA, 201 bp, Homo sapiens
taccaagggacctatttttttttttcacacaagaaaaacaacttagttaaataaattcttggaccaaagtcttttcccttcattgctttgccaacattgckgcaacagatgtgagcatttattattaaagtggaaaagtctagggccaacctgaccctattcctttgttgataacccttgtcttctgccttatgcttgagg

SEQ ID NO: 48872 - DNA, 201 bp, Homo sapiens
tgggcagatcgcctgagcctgggaggttgaggttgcagtgagccgagatccttctcctgcactccagcctgggtgggcatcagaagtggcaccctgcctcaaaaaaaaaagttgtacagtttgttgttttacatttaagtgtgtgttgtactttgagtgtttttttgtgcaggttatgagacttagtaggttaagttcagg

SEQ ID NO: 48873 - DNA, 201 bp, Homo sapiens
ttttaatcatatggatattatgagaatatgtctatagagtaggtgtcatttaattatttttcttaggaaacagtgagaacttttgatgtgtccttttgggygctttttcagctttatagaattcttgtctatggtggctttgactgtcactgcttctgatctaatttttctgatctcttccttgggtaagtatgatttctg

SEQ ID NO: 48874 - DNA, 201 bp, Homo sapiens
tggcaatgagcctgagcacagtccctggagcttacagtggtcacgtaaagtaaaggcaatgactgtctctggttgaaggggacttgatatatttttttaarttagaaaaaaactgagaataaatatgctagcctaaatgaatatcataggcatataataatgacactggggtttcaagtatgaggatctaaagagtagttg

SEQ ID NO: 48875 - DNA, 201 bp, Homo sapiens
aaaaaaaaagttgtacagtttgttgttttacatttaagtgtgtgttgtactttgagtgtttttttgtgcaggttatgagacttagtaggttaagttcaggttttttttttttttgtctatggctgtccaattgctccagtgccattcgttgaaaaggctatttttcctctaattgcttttgcatttttgtcaaaaatcatg

SEQ ID NO: 48876 - DNA, 201 bp, Homo sapiens
aaaaaaaagttgtacagtttgttgttttacatttaagtgtgtgttgtactttgagtgtttttttgtgcaggttatgagacttagtaggttaagttcaggttttttttttttttgtctatggctgtccaattgctccagtgccattcgttgaaaaggctatttttcctctaattgcttttgcatttttgtcaaaaatcatgt

SEQ ID NO: 48877 - DNA, 201 bp, Homo sapiens
aagaagctatgaatgcacatggctggtctgtaagctccttgtgggatctataagacctgtgtctgtctggtttacagctgaatcttcaatgtctagtgcartggctggtacagaatagatgatcaataaataaaaacatatcaatgcaatgaatgaataaataaaatggtctaatcctcaagctaacatattgatcttgag

SEQ ID NO: 48878 - DNA, 201 bp, Homo sapiens
cccactttcctactgctgctgctgcatctgaagacaaaaagcaaggatgccaaagataaagagaagctgaatcgacatcagtttgccccaggaacattctytggggttctgcagtgtttggtttgtgataaaacactcctggggaaagagtcactgcagtgttctagtaagttctcaggtctatgtgcgctgtctttgttt

SEQ ID NO: 48879 - DNA, 201 bp, Homo sapiens
gggttttctcttggaggtcttactgcttgctaattagcaacatctttttcgtggactttcacattagtggttgtattcatgttagtgataatcttctatgstaaatactatttcatagaaatactcactaaccaagaccaacaaatttgtgcgtatttggaggagaagctgcatatctatgctgaacttggagaactgagc

SEQ ID NO: 48880 - DNA, 201 bp, Homo sapiens
acacagcttattcactgaaggatatctgagatgattccagtttttggtgattacaaatagagctgccataaccatccatacacagatttcatgtgaatatmagtttatacaacacctaaataaatacctgggagtagaatttctaggtcgtatggtaagtttatatttatcaaagggagattgttaaatgtatttcagatt

SEQ ID NO: 48881 - DNA, 201 bp, Homo sapiens
aaaaaaaaaaaaaaaaaaaaaaaaaaggacaatgtgagggcccaagtcctatgggatcactgcactctgcctgagatgcccttaccctaaggaacaaacayagaatcaagttgtcctagaaaggccagggtgggtttgtcctggaggcacactcactgcgagcgtgctctttttccagtatttgaaggactctctttatat

SEQ ID NO: 48882 - DNA, 201 bp, Homo sapiens
tagtgggatgttcatgattaaggaccaggtttttgtttttattggtttttttttctcccctccttccctttttaatagtaacatttggaaaatatttctaratgttttggattactgtggccaactcttgcatggggcctgaacattttcagtatcataaatactctttagctttacttttttctcataagggatattttc

SEQ ID NO: 48883 - DNA, 201 bp, Homo sapiens
tctctaaaaataatttttgaaaagcaaacggcaacgaagtaccacactcctacatctagtacattttaaagaaagaaaaaattctttcctgtgccctgaasttctttaactttaaaaacagaacaaaccagctctgatacccatacctaaatacatcaggaagcatcttccctaatgtcaaatgtgttgttgttggaagga

SEQ ID NO: 48884 - DNA, 201 bp, Homo sapiens
gtttgttttttgagcagaaatcttttctcagagatttgtataattttgacaattaggttaactgggataacacattctaatgttttatgtgttgatgctcrgatgactttggagttgaaagccccctcgaccttcctgctccatcaaactacctccctccacttgtgttcccagtagcttgatatggctggcaagcaccaa

SEQ ID NO: 48885 - DNA, 201 bp, Homo sapiens
gaaatctgaggacaatgatgcatgcaaagatgggcaaagaaattggatgtttagaaacaaaaacttaaaccagtatgtttggtttagcctgtgccgttccaggcatttgtattgttcactcatcatggacagggccgcctcaattttcattcctaagcttaatgtttagtcttaatagaaaacagcctgaacaaacaaaga

SEQ ID NO: 48886 - DNA, 201 bp, Homo sapiens; identical to SEQ ID NO: 31107

SEQ ID NO: 48887 - DNA, 201 bp, Homo sapiens
tacacaccacattcttcttaagaatcgccatgtttgatggaaaaagtcttcaaatttggagtctgtagattcttatcagtttctgttgtccattattatarttacctggtgtttaattagctgtgcttgaggctgtgatctcattagctcctttagaatgaccgtgaaatttcaaggcatactggagtttggtttgcatat

SEQ ID NO: 48888 - DNA, 201 bp, Homo sapiens
cctactgcctacctgggcattcacaaaaatcttgaactctccaaatttgtaaaatgagatacagtgattgggtgccattgttaatttcttccaactctgayattcttattatgtctaaatacactgtccctttgataaaatgtgtaaaacaaactttgtaaatggaggaactaatatggtatgtgttttttcctcttcagt

SEQ ID NO: 48889 - DNA, 201 bp, Homo sapiens
catgtctgttcacttatgctatagggtgtatttttaatgaattgtttttctctttagaacagccactaaaacctgaaaaaatacatacacatacatatatrtgtacacacacacacacacacacacatacacacacacgtatatgctattcttcctaagtcatatgagccatgataacagattctgtttttgtagaattca

SEQ ID NO: 48890 - DNA, 201 bp, Homo sapiens
tgtaataggaagtgagttctcagggagacacagaagcattgcagaagtgtatatcattcataacttcagatttagtaattgataagatcctgtgtataagrggagaaatatctccaaagagattaaaataatagcattctgcttgtgcttgagtggtgaggatacatgtgatttaaatatttgtctttccttctttagttt

SEQ ID NO: 48891 - DNA, 201 bp, Homo sapiens
acttatataaggtaactcattttctcattattttctagctggtagtgtgtataatgatacaatatggttgagtatgcatttcagactaacatatgactgcyagtttgtgtgccttagttttcattttattgttctgtgtcttgtagagcaaagagcttacagcttatcggagccaccaagagaaaacaggtacttttaact

SEQ ID NO: 48892 - DNA, 201 bp, Homo sapiens; identical to SEQ ID NO: 31147

SEQ ID NO: 48893 - DNA, 201 bp, Homo sapiens
aacatttgagtgaaagtgggcagatacatattttttactaaaaggaaaccactcactattcaggtcacacaaaagcataatcacatacacacacacacacmccccccacacacaccccattgttaagctaggtcaacagtaaatgaatgaatgaatgaatgaatgaatgaatgaacaaatggacaagcaaacagcagaatt

SEQ ID NO: 48894 - DNA, 201 bp, Homo sapiens
aagatatacatacattttccttctagggttctagctttatatgattttgtgattatgaacaaatcatctttaaacaatccttataaatgaaaaactcgtcrtacacattgtttgaattcatatgatctgtaactttttaatcagatagattattttccaatagaaattgttcagatcaaaatagacatacctcagtatgaa

SEQ ID NO: 48895 - DNA, 201 bp, Homo sapiens
gataattgtatatattaccattatttgggtttagcaaacagctgaaggattttaaaatgtctaaggagtgacaggatatttttatgtttgtgaataaaagrtatattgattcttaagcaggaattttgtttcatggcttctttttttgaaagagctttgttgagtgaacggaatggtctccattaatttattgctgagaga

SEQ ID NO: 48896 - DNA, 201 bp, Homo sapiens
aatttgatactctagccatcaagtgcccagaactctttgccccagagcagggcagcctggattgttctgacactcgtggagaattcaatgttggctccacytgccatttctcttgtgacaacggctttaagctggaggggcccaataatgtggaatgcacaacttctggaagatggtcagctactccaccaacctgcaaag

SEQ ID NO: 48897 - DNA, 201 bp, Homo sapiens
gaaagttgagaatctgaatacagatttaattaacactctctttgcttgtgaaccccttgggaagtcagccttatcctggtttgaagaattccacttcagcrtttggaatggtgcattttgaaatgtgataggaagaacagcttgtgacacaacacaattcagagaaagcagtggggttaggttcgcaccaaagggttatcg

SEQ ID NO: 48898 - DNA, 201 bp, Homo sapiens
ttttgtatttttggtagagatgaggtttcaccatcttagctaggctggtctcaaactcctgacctcaggtgatctgcctgactcggcctcccacagtgctrgtattacaggtgtgagccactgctcccggccttgtacttgatatttaacaagccagtgtgctctgtcagtattgcaacatcttgtatgaacttgaacggg

SEQ ID NO: 48899 - DNA, 201 bp, Homo sapiens
ttttcctttttcccatttcgaagataaagcaactgaggctcagaaaggttattgtctagtgatagattgctagcaagtaacagagccaaaatttgggcgcmgattccaccacttggttgggaaagggggaagaaagtattttcctccatttctgtgtttccaatcatttgtcattgttttctggtaaggtcattggggtgt

SEQ ID NO: 48900 - DNA, 201 bp, Homo sapiens
tcactctgcattttgtgcaaataaacagctgtaaatcataacgttatgatactctcagtgtttaatcataggtcctgcagagatcagcagcttataagaayacaaaatatgcctacttaccaaagtcaagattcagaagctcccagatgaaaagttctaggcttatgagataactctactctctgggacacattaactggt

SEQ ID NO: 48901 - DNA, 201 bp, Homo sapiens
ttctgacactcgtggagaattcaatgttggctccacctgccatttctcttgtgacaacggctttaagctggaggggcccaataatgtggaatgcacaactkctggaagatggtcagctactccaccaacctgcaaaggtaataatatgtacttgctaagacagttctacttttggaaatttattctacaacaacaaacaat

SEQ ID NO: 48902 - DNA, 201 bp, Homo sapiens
tttacaagtacccagttgcaaacactccaagatctgtataaaattggagaaatagacttagaataaggtgaagagtgatagaaaaaagagaaaaactaatmtgtatactggaggttacgggattctcagaagaaagaaatgtgtggattcagtataaacattctatctgcattgtacttgatatacatacattttttgaga

SEQ ID NO: 48903 - DNA, 201 bp, Homo sapiens
tttacgaggagtacctcacactaaagtcatgttccagaagtgtaatattgacattttgtgttttcatttacggagacctctgagcaatctatgtgactccyctgggttcctaagtataccttgattttaaaatgaggcagtggtttgaaagcaggtcttgaagagatatttgtgcacccatgttcatagcactattaatca

SEQ ID NO: 48904 - DNA, 201 bp, Homo sapiens
catctttgtaccagtgcagttgcaaaatagaatttttaatatgttagcatggaggaagaagcctacataggcaaagttgcctgaagtctatgaaagtcatratgcagccctggctatatcagaatgaagtctttaaggcaaaacaatgccctggaaatgtcagcaagggaggtacaagcatgactaaccctcatgcaggca

SEQ ID NO: 48905 - DNA, 201 bp, Homo sapiens
cttggctactggaaactggaattctgttcctccagaatgccaaggtaagagtgtattctttctaacatcatggaaataaattgtaggcagtatttttaaargctggattttagaggtgacaactatgtaagatccaccttgaaatggactggaaaattcataaatactctcactcatcctcttgtcctataacccaaggat

SEQ ID NO: 48906 - DNA, 201 bp, Homo sapiens
aggccaagaggggcatgggaaggtgttccaggcagtctctcttttggaaaatggaggttttagggttctgaacacactgaaaatgtggacaggaaagatayagcatctaggaattttttctgaggaagaacccggcccttccattacctggctttagaagataccttttccacttagctatttcgtgtgagccgctggaga

SEQ ID NO: 48907 - DNA, 201 bp, Homo sapiens
ttttgtgtattaatgttctggtcggaaattcatctgagtatgcagaagcatacttgggatcacggcctcttttttggtgaggggtactaacctggcactcmctctcctttactctagaactaacaaaccagaaagaagtggcagcatggacttatcattacagcacaaaagcatactcatggaatatttcccgtaaatact

SEQ ID NO: 48908 - DNA, 201 bp, Homo sapiens
catggatccaccatcattaatttccaccctcaattaatggcatttgtgtttgttttcaatattccgctcttacaaataatgtcttcacaaaaatctctaamtagattttttggtatgcatcttgattacatacttagcataaattcttgggtccaaaagcatgataacttaaaaattattgacacatgttgccaagatgct

SEQ ID NO: 48909 - DNA, 201 bp, Homo sapiens
aaagttgtaattctgggagattatgaaaaagttatttttgtgaaaatgttcacagatgacttcatgtctaggagttacaccagtagacatgtttcaaaaakgtttagtaaattgatttgatgtgtcagatatgaagttgttaattactcaacaatttgagagtactgaactgaaattcactgtgttattttggctatttga

SEQ ID NO: 48910 - DNA, 201 bp, Homo sapiens
ctgtacattggttttccatgagggagcatataggtcttgaagaggtttgtaaaaatcaaactatctaagtaaatgagacttatctgaccaaggtattgttktcagaatagccttagatttaaagaaagaatagtcacttcatttgtctataacccaacatttattgataaataatagtcttatattagagaattaatgggg

SEQ ID NO: 48911 - DNA, 201 bp, Homo sapiens
cgcaaagccttaatgatattattactatctattactaccactgctactaatatagcagctaatgttcattgagcactttctatgatctcagtctaactctrtgaggtagttacaattattactaccattttaaagatgagaagagacaacacatggaatatgtgtgctctcttcgtatatggttatttattttacatcttt

SEQ ID NO: 48912 - DNA, 201 bp, Homo sapiens
gaacagcaaaaaaaaaaaaaaagaaaaaacaagaaggcaatagaatagatggctatacaccatgatgctgacacttagtctgagttatggaatgtattgtwtatgttatctgggagaaaaagacacaatgagctctttgacacacttaaaacggatcataagggattattcaagccattgttgtctccaggaaggtaaatg

SEQ ID NO: 48913 - DNA, 201 bp, Homo sapiens
ccctagacacacactctaggtaaaaacattttattcttgggagaaaacattgactcataaatttcaaaaaagaaaagggaaagggaaaggaagcaaaaccracagaactttcaggctaattttacttgtttgaagtaaaaacttgtgaaagaatgactatttcccaagatgcagccaatacaaagagaccaagtagagatg

SEQ ID NO: 48914 - DNA, 201 bp, Homo sapiens
tttcagtttgagatgatgaaaagagttttggagatgaataatggtgatggtggcacaataatatgaatgtgcttaataccactgaactgtacacttgataytggtgacatggtaaatggtaaattaaatttcatgctacgtatatctcactataataaaaaattgaacagcaaaaaaaaaaaaaaagaaaaaacaagaagg

SEQ ID NO: 48915 - DNA, 201 bp, Homo sapiens
ctcggcggaagagggaaatagggagttatggtttaatggatacggagtttcagtttgagatgatgaaaagagttttggagatgaataatggtgatggtggyacaataatatgaatgtgcttaataccactgaactgtacacttgatattggtgacatggtaaatggtaaattaaatttcatgctacgtatatctcactata

SEQ ID NO: 48916 - DNA, 201 bp, Homo sapiens
ggaatattattcaaccttaaagaggaagtaaattctgacctctgctacaaacatgaatgaaccttgaagacattatgctaagtgaaataagccactatgaraggacaaatactgtatgattccactcatatgaggaacttagagtagtcaaagtcatagagacagaaagtagaacggaggttgccaagggctcggcggaag

SEQ ID NO: 48917 - DNA, 201 bp, Homo sapiens
gttaccttataaatcacatgtctgtggtctgatttgacaaaatgatcctctttcaatatgttaggtttctaatcttttgctcttatactaaggcactcatsgggggcgggtgtggtggttcacaaggattattattttttttacgaggagtacctcacactaaagtcatgttccagaagtgtaatattgacattttgtgtt

SEQ ID NO: 48918 - DNA, 201 bp, Homo sapiens
cactttggccaggctggtctcaaactcccgacctcaagtgattcactcacatcagcctctcaaagtgctgggattataggtgtgagccattgtgctcagcyggatttttggttcttaaatgctctgagtctgtaaaaaccagaggtcaaagcccagagcaaagaggtagtctttacactttgaaaagtttcagaaatagcc

SEQ ID NO: 48919 - DNA, 201 bp, Homo sapiens
gaaatagctttttcttcttcctttaatgctcttcttcctgcttctcactggctggtttcttgcagtcattcttctctccacttaaacattatctcattaawgaggtcttccctgacgttcctgaccaacatagtgacacagtcattctatcacataagtttcatttcctacctagcacttatggctatattctgttaatat

SEQ ID NO: 48920 - DNA, 201 bp, Homo sapiens
tcttaatacctataccaatatttcgaatcatctctggcatacgaatgtatttatatccaaaggcaaagctctggaataaataagaaattagtaaaaggtayaatttttctcttataaagtgggagaaaggtgtattttaggcagattgtttttaagaaagtatatatgtgaaagttgagaatctgaatacagatttaatta

SEQ ID NO: 48921 - DNA, 201 bp, Homo sapiens
gaaaagatatacatacattttccttctagggttctagctttatatgattttgtgattatgaacaaatcatctttaaacaatccttataaatgaaaaactcrtcgtacacattgtttgaattcatatgatctgtaactttttaatcagatagattattttccaatagaaattgttcagatcaaaatagacatacctcagtat

SEQ ID NO: 48922 - DNA, 201 bp, Homo sapiens
aataaacaaaacaattagtgaggagattcaaatggaagaaatagtttgaggcagaaagcaatcattgcagttttaggtgtgttgaatttgagaagatggcrtgatatatgggagcaagtagtctcaggcaagaggaagggcggaaatgaaatcctggattgcacccattcaagtaagatagagggagctgcggcaggctac

SEQ ID NO: 48923 - DNA, 201 bp, Homo sapiens
tggacaactgatttttttcagccaagctcttcaagcccgctgctatgctgcagcttagctggcgacaggcccttatcaaggcagaactgtgccttgatagmggccaggaaggcgattcagagcagtaggccttgtccatgtgtttgttccctgcttcttcaccacttgaaaatagtgtttcagtgcccagtaacagggcac

SEQ ID NO: 48924 - DNA, 201 bp, Homo sapiens
caatggaggcagggatgaggtgctgtgggagcctggaggaaggaacacagagtccacctgggaaagccatggagaataggtggagtaaagtttatcagacrtaagaagagaggacagccaggattgtggggagagcatgtgcaaattcaaggaagtaggaattctgttttgctgagaaagtacatacagtgggcaatgagg

SEQ ID NO: 48925 - DNA, 201 bp, Homo sapiens
cacaaaattttcaaagacccacacacgtctgaatttcttttataattattttctttgaagtcaaagaaaatgttttaatatatagtgatatattcatcttygtaccagtgcagttgcaaaatagaatttttaatatgttagcatggaggaagaagcctacataggcaaagttgcctgaagtctatgaaagtcataatgcag

SEQ ID NO: 48926 - DNA, 201 bp, Homo sapiens
aaaatggggctactattatcagccttacctacctgcctcactagtagttgtgaattaatgtgtgtaaacgcaactttaaaactcttataggatttataggraaaatgatgatgatgacatgttaccttataaatcacatgtctgtggtctgatttgacaaaatgatcctctttcaatatgttaggtttctaatcttttgct

SEQ ID NO: 48927 - DNA, 201 bp, Homo sapiens
acacagtcccatgcaccctacatctcatcactggggtgtgacacacacacacacacacacacacacaactccacaccatcccatgcaccctacatcatccrtcactgtggcatgacacacacatacacacagaaccccacactgtcccatccaccctacattatccatcactgtggcatgacacacacacacacacacaca

SEQ ID NO: 48928 - DNA, 201 bp, Homo sapiens
catatagggtgcattggaatgaagaagatggggcttgggggaataaatcatgcatgaggaatagcatgggatggggaagggtaatggacaaggtgtttagytcagtcctgtcacttcctgtccttaagctagtggtttagactctctgaggctcagtatcttctgtaaaatggggctactattatcagccttacctacctg

SEQ ID NO: 48929 - DNA, 201 bp, Homo sapiens
cccatgcaccctacataatccatcactgggcgtgacacacacacacacacacacacacacacacacacaacctcacactgtcccatgcaccctacatcatycatcactgggtgtgacacacacatacacacaatcccacactgtcccatgcaccctacatcatccatcaccaggacatgatacatgaacacacacacaaca

SEQ ID NO: 48930 - DNA, 201 bp, Homo sapiens
tgtggacaggaaagatatagcatctaggaattttttctgaggaagaacccggcccttccattacctggctttagaagataccttttccacttagctatttygtgtgagccgctggagagtcctgtccacggaagcatggattgctctccatccttgagagcgtttcagtatgacaccaactgtagcttccgctgtgctgaa

SEQ ID NO: 48931 - DNA, 201 bp, Homo sapiens
atttatatccaaaggcaaagctctggaataaataagaaattagtaaaaggtataatttttctcttataaagtgggagaaaggtgtattttaggcagattgkttttaagaaagtatatatgtgaaagttgagaatctgaatacagatttaattaacactctctttgcttgtgaaccccttgggaagtcagccttatcctggt

SEQ ID NO: 48932 - DNA, 201 bp, Homo sapiens
atcaaggaagagcatgaggaaaccaatctttatcagaactgaggtcactcagggcttaattgtgctcaggaattcactttggctgcactcacttggcaacygaagtctgattaggatgacatcctgtgttctagagacaaagcccggtcaggatcattttacaggactaggtaacagtgtcaacaataagctatgctagtc

SEQ ID NO: 48933 - DNA, 201 bp, Homo sapiens
aaagtttcagaaatagcctggaaatgaaatgctttatcaaggaagagcatgaggaaaccaatctttatcagaactgaggtcactcagggcttaattgtgcwcaggaattcactttggctgcactcacttggcaactgaagtctgattaggatgacatcctgtgttctagagacaaagcccggtcaggatcattttacagga

SEQ ID NO: 48934 - DNA, 201 bp, Homo sapiens
gaatgtatttatatccaaaggcaaagctctggaataaataagaaattagtaaaaggtataatttttctcttataaagtgggagaaaggtgtattttaggcwgattgtttttaagaaagtatatatgtgaaagttgagaatctgaatacagatttaattaacactctctttgcttgtgaaccccttgggaagtcagccttat

SEQ ID NO: 48935 - DNA, 201 bp, Homo sapiens
tatgtaagatccaccttgaaatggactggaaaattcataaatactctcactcatcctcttgtcctataacccaaggatcccaaatgcaaatgcctccgggrgataggcagattacacaagtgtcaggatgtctggccatagacagtagggcatggcccttgctaactccttatcagggtctttacccagacctgaaggctc

SEQ ID NO: 48936 - DNA, 201 bp, Homo sapiens
gaattgcaaggtgcttgtgaggattaagtacataaaaagtatacaattaaatagcatgtataaagtacctagcatagagcttctgctctactgacatatcygaggtataggaccatgtcctatacttgagagggagttgggagcagcggctaaggtggctaaagagagtggttcaccatgtagtctttgagggtagccttt

SEQ ID NO: 48937 - DNA, 201 bp, Homo sapiens
cgaatgtatttatatccaaaggcaaagctctggaataaataagaaattagtaaaaggtataatttttctcttataaagtgggagaaaggtgtattttaggyagattgtttttaagaaagtatatatgtgaaagttgagaatctgaatacagatttaattaacactctctttgcttgtgaaccccttgggaagtcagcctta

SEQ ID NO: 48938 - DNA, 201 bp, Homo sapiens
ttcaacctccaggaaccatggttttctcatctgtgaaatggagctaagaattgcaaggtgcttgtgaggattaagtacataaaaagtatacaattaaatarcatgtataaagtacctagcatagagcttctgctctactgacatatccgaggtataggaccatgtcctatacttgagagggagttgggagcagcggctaag

SEQ ID NO: 48939 - DNA, 201 bp, Homo sapiens
gaccacggcttttatcagattttcaaaattcataagccctggaagaataagaataactgtgttaaccctatgcacattcatgtgagcaagcttgggcaaaycatttacgctcactgagtctcagtggtggggagtggtggctgccccatcttaggcattcgaagtctgaaagacttcctgcagaacagcagataaatgcta

SEQ ID NO: 48940 - DNA, 201 bp, Homo sapiens
ttgactctggacactggtctgcacccttgccaacctgtgagggtaggatttttcattagcaacctccattctgtccaagaaggaatcatggcatggtagasaggccaagggctctcagtgtcggggtgatctcttctaagttcttgcactagagcaagctcttcaacctccaggaaccatggttttctcatctgtgaaatg

SEQ ID NO: 48941 - DNA, 201 bp, Homo sapiens
tcgaatcatctctggcatacgaatgtatttatatccaaaggcaaagctctggaataaataagaaattagtaaaaggtataatttttctcttataaagtggragaaaggtgtattttaggcagattgtttttaagaaagtatatatgtgaaagttgagaatctgaatacagatttaattaacactctctttgcttgtgaacc

SEQ ID NO: 48942 - DNA, 201 bp, Homo sapiens
tatcctggtttgaagaattccacttcagcatttggaatggtgcattttgaaatgtgataggaagaacagcttgtgacacaacacaattcagagaaagcagyggggttaggttcgcaccaaagggttatcgatcactctgcattttgtgcaaataaacagctgtaaatcataacgttatgatactctcagtgtttaatcata

SEQ ID NO: 48943 - DNA, 201 bp, Homo sapiens
tgccagcccggctacagagtgaggggcttggacatgctccgctgcattgactctggacactggtctgcacccttgccaacctgtgagggtaggatttttcrttagcaacctccattctgtccaagaaggaatcatggcatggtagagaggccaagggctctcagtgtcggggtgatctcttctaagttcttgcactagagc

SEQ ID NO: 48944 - DNA, 201 bp, Homo sapiens
aactgccaaatagccatcttgtaccagagattccagagagtggtctttggaatttcccaactcctttgcttcagtgccctgatctctggtaaactttatgytaacttttcacttaggcctaagtaattagggtagagcccagatctatgtgtgagaaatttaaggattgtagccagttggtttgaggcatgggaaaactgt

SEQ ID NO: 48945 - DNA, 201 bp, Homo sapiens
ataatttccccataagattagaaagggtggcctctacatctataagtggacactagaagacctactgagacaggtttatagaagtatagggaatagaggayattaagaatacagcttggaggaatctttgtttttaacagactcagatcaccctgggaactggtaatccaagtctggacaaacatcattagggtctcttga

SEQ ID NO: 48946 - DNA, 201 bp, Homo sapiens
tttaaataaacaggaaagaaacccatttccaggcctgattgcttgctttgtacacctcttcatgtgggaaatggcctctcctgccccgggtggactcccayagactatgataagagtgctgtagtacctttatacttttgaaacgcacattctttagttcatttggtatcaaaaacacttgtgaaaaagggctgttctgag

SEQ ID NO: 48947 - DNA, 201 bp, Homo sapiens
aaaagttgaagaattcagaggagaagagttcaggctgtggtgatcagcagagtcttcagagactttacgagttaaatcctggaggattagtgggattttaygccataaaagtggaaaaattctcaggggaatgtgagccaagaaccagaagcaataacacacaaagtcacttcagggaattccaagaaactaatctatctt

SEQ ID NO: 48948 - DNA, 201 bp, Homo sapiens
aagttgaagaattcagaggagaagagttcaggctgtggtgatcagcagagtcttcagagactttacgagttaaatcctggaggattagtgggattttacgycataaaagtggaaaaattctcaggggaatgtgagccaagaaccagaagcaataacacacaaagtcacttcagggaattccaagaaactaatctatcttga

SEQ ID NO: 48949 - DNA, 201 bp, Homo sapiens
tgaagaattcagaggagaagagttcaggctgtggtgatcagcagagtcttcagagactttacgagttaaatcctggaggattagtgggattttacgccatraaagtggaaaaattctcaggggaatgtgagccaagaaccagaagcaataacacacaaagtcacttcagggaattccaagaaactaatctatcttgaccag

SEQ ID NO: 48950 - DNA, 201 bp, Homo sapiens
cattcaagtaagatagagggagctgcggcaggctacgaggtctctgaagcagagggtgtagagaaaatagggtgacattgtaagttcttgagtatggctgyctaaatctttgacttctttgtcttcgtgacttgtacctatactcttctctgtaagcttaccatcctcccactgccctttgcagcaaatgacctacatgat

SEQ ID NO: 48951 - DNA, 201 bp, Homo sapiens
ccatgtatatttggctttctgctgaatttcttatatttctgtaccatttcttgcttctttttaaaatagcaacaacaatgactcctctgatttcttctctkggccaggagaatcatctcctcaaggatgatttttaataattttcctcatctggttttctatctctgacactgatagtttttcttaacttccttaaatagc

SEQ ID NO: 48952 - DNA, 201 bp, Homo sapiens
tctgtccttcctcatgtcacaagctaaagctaatacacaagtactcagagacttaaaggaagaaacatttgcagatgtccaagatgtgttagaaaaatagrcatattaaatgtaaaacctgctatagaaattggtaaactagaagttgcatattatgtgacagtataaacattccatattttcataataatttgaacctaa

SEQ ID NO: 48953 - DNA, 201 bp, Homo sapiens
ctccaagtgtgagcttggacccaggcaggcctcaggtcagtggtaacggacgactgcttccgtggtgttggcaggtggaaatggagggatacagctttgtscggctcatgaatccctgggcattgtcccgcctgctagagcctctgatctctgccccttcttcacctgcagtaaaacagtcactagtttggttgctctccc

SEQ ID NO: 48954 - DNA, 201 bp, Homo sapiens
tattgttgtcagaatagccttagatttaaagaaagaatagtcacttcatttgtctataacccaacatttattgataaataatagtcttatattagagaatyaatggggagaaaagaataatgctaagaaaatatgtaactgcaataatttgtaaaaatacttttggggggaaattgtgaattaaaatttaaattcatttat

SEQ ID NO: 48955 - DNA, 201 bp, Homo sapiens
ataggtcttgaagaggtttgtaaaaatcaaactatctaagtaaatgagacttatctgaccaaggtattgttgtcagaatagccttagatttaaagaaagawtagtcacttcatttgtctataacccaacatttattgataaataatagtcttatattagagaattaatggggagaaaagaataatgctaagaaaatatgta

SEQ ID NO: 48956 - DNA, 201 bp, Homo sapiens
tatattccccaagctttttccccctcaatgtatccaattccttagttaacttttatagacaatgctgctttttaaacgcaagattttcatttataaaaathtgcagaaatataataaagaaatgaagaaatatcctcttaaatactcctatcctaaaatagacactgttaggcttctggtatgaattcttccaatattttc

SEQ ID NO: 48957 - DNA, 201 bp, Homo sapiens
gctgccttacactgctgtctgagcatctggtggatctgccccaatttcaggctgtatgggctgactttggtggagaaataccttcttatgtggaataatgygaggatgctggctgggtgggatgcaaaagttctgacttcagtaggggcaaagctgtgtggtctccatgcagatctgtcagctgaggttggtgttagtgaa

SEQ ID NO: 48958 - DNA, 201 bp, Homo sapiens
gccattcagctagattgggttcatctgagatgagaaaggaaaaaaattcctttctttccccaaacacaaatgcaggcagtttcagaatggcctcattcatmatttccccataagattagaaagggtggcctctacatctataagtggacactagaagacctactgagacaggtttatagaagtatagggaatagaggacat

SEQ ID NO: 48959 - DNA, 201 bp, Homo sapiens
atgaagcatcatgaaattcaaacaatcacttttagccaaataccatcgttgtatattaatcacacacacacacacacacacacacacacacacacacacasagagagagagagggagaaagagagagagagttacagagttcaggttgctgaattataaaatgatctcttcttttctcctctgccatgcccatgatagcca

SEQ ID NO: 48960 - DNA, 201 bp, Homo sapiens
aattgccaaaatttaattctcttcctacctgccattcagctagattgggttcatctgagatgagaaaggaaaaaaattcctttctttccccaaacacaaaygcaggcagtttcagaatggcctcattcataatttccccataagattagaaagggtggcctctacatctataagtggacactagaagacctactgagacag

SEQ ID NO: 48961 - DNA, 201 bp, Homo sapiens
tgatgaagcatcatgaaattcaaacaatcacttttagccaaataccatcgttgtatattaatcacacacacacacacacacacacacacacacacacacasacagagagagagagggagaaagagagagagagttacagagttcaggttgctgaattataaaatgatctcttcttttctcctctgccatgcccatgatagc

SEQ ID NO: 48962 - DNA, 201 bp, Homo sapiens
gaaattgaccagcttatggagaagctggcctgaattgccaaaatttaattctcttcctacctgccattcagctagattgggttcatctgagatgagaaagraaaaaaattcctttctttccccaaacacaaatgcaggcagtttcagaatggcctcattcataatttccccataagattagaaagggtggcctctacatct

SEQ ID NO: 48963 - DNA, 201 bp, Homo sapiens
gtgtgtaaaggtgagtttcaggtagttgggatgtataatgtccattgcacccagtccttacttagtgcatagatgaaattgaccagcttatggagaagctkgcctgaattgccaaaatttaattctcttcctacctgccattcagctagattgggttcatctgagatgagaaaggaaaaaaattcctttctttccccaaac

SEQ ID NO: 48964 - DNA, 201 bp, Homo sapiens
aataaataaataaaaatggacttccacattagggacattagtatatagaatcctggaattcttaagttagaagaatgctaagagttcatttaattcatatkcaacttccacgctttaaccttctacttttcccctttccctcagcaccaatgaccttaccaagtagttgtctaatttctacttgaatgcttccagtgatgg

SEQ ID NO: 48965 - DNA, 201 bp, Homo sapiens
ccacagtgtttaggtatgtagaccttattcttttcatcctcactgacatagaattttgggggagaagaggacacaatgagctttctccattaaaaaatgtragaaataatgaccatctaggttagatggaaaactctggttatcactgttaactgtcaaccagagtaacattaatttcaattttcatggtatttttttatg

SEQ ID NO: 48966 - DNA, 201 bp, Homo sapiens
atgggcccagcaagctggaatgcttggcttctggaatctggacaaataagcctccacagtgtttaggtatgtagaccttattcttttcatcctcactgacwtagaattttgggggagaagaggacacaatgagctttctccattaaaaaatgtgagaaataatgaccatctaggttagatggaaaactctggttatcactg

SEQ ID NO: 48967 - DNA, 201 bp, Homo sapiens
gtgagagagtgtggagaacttgagctccctcaacacgtgctcatgaactgcagccaccctctgggaaacttctcttttaactcgcagtgcagcttccactkcactgacgggtaccaagtaaatgggcccagcaagctggaatgcttggcttctggaatctggacaaataagcctccacagtgtttaggtatgtagacctta

SEQ ID NO: 48968 - DNA, 201 bp, Homo sapiens
tgataaataacatttatttgaattaaatctaatttcttgacctttaatttcctatccataaattagaaagaataaccctgaagttccctgaaaatgtagtytaaggaggatgacagtctacttctttcaaacttccagtgtccagatatgctgaacacttattaagtatttcaataaacacatactgacatgccagttgat

SEQ ID NO: 48969 - DNA, 201 bp, Homo sapiens
aggatggtaccagcccccctctatcatctgtctcctccactcagtgtccctagacacacactctaggtaaaaacattttattcttgggagaaaacattgamtcataaatttcaaaaaagaaaagggaaagggaaaggaagcaaaaccaacagaactttcaggctaattttacttgtttgaagtaaaaacttgtgaaagaat

SEQ ID NO: 48970 - DNA, 201 bp, Homo sapiens
atttcaataaacacatactgacatgccagttgatcacaaatgtagtaataacatttagactaacagtattttaagaaccaaaattttgtaaatagtatatktggaggcaagatttatcaatgcattagcaggtatttgtcggatgctactatgtgtccatctttgcatcttggttctttggatatcacccttcgagagaat

SEQ ID NO: 48971 - DNA, 201 bp, Homo sapiens
tcacatctgtgaatgtccatgactctgacctttccatatctatgcagcctcctgccaggacatgtcctgcagcaaacaaggagagtgcctcgagaccatcrggaactacacctgctcctgttaccctggattctatgggccagaatgtgaatacggtgaggcttcctttttgttgatattattttggttttatgctagaga

SEQ ID NO: 48972 - DNA, 201 bp, Homo sapiens
tgacattgggcttccataataaaacaatgcttggtttgaaaaccacagcccattttgtaccacatagggtttctctgtccacacatctgtcattggctccrtttgtccctctgtgtccacacacaacaataccctccttaggaaatactaaatgcagtatgaaatgggagccacgcaatactccagcaggcccctacaatg

SEQ ID NO: 48973 - DNA, 201 bp, Homo sapiens
gagtatttctagtgtgccagctctatgccttttgcacatatcaacttatttaaaattatacaacaattctgtgaaggagatttcagtattaatctcatttyatagttgtagaaactgaggcacaaatggatgaagtaaacttttcaaagtaaaacaataagaggtagatataggcttcaagtccagagatactgaattcac

SEQ ID NO: 48974 - DNA, 201 bp, Homo sapiens
gataactctactctctgggacacattaactggtttgagttgagttctccctggtatctggtcaggctgtagtcaaaagtgcatgaacacatgcacacacaygaccccacactgtcccatgcaccctactgggcgtgacacatacacaaccccacactgtcccatgcaccctacataatccatcactgggcgtgacacacac

SEQ ID NO: 48975 - DNA, 201 bp, Homo sapiens
catggaataacaaaaggtaattaacatgattatataatttgaatagtgttgtaatagttcataaaatggaaaagccaatttgagcccagaatctgggagayaggcagaactctggactgtaaagaatggcccagcaaagaggaagaaaatgggcattctaagttggtgcaataatatcagcacaggagaaaagacagaata

SEQ ID NO: 48976 - DNA, 201 bp, Homo sapiens
ttttgcatttttagtagagacgaggttttaccatgttgccaggctgttctcgaactcctgacctcaagtgatctgcccaccttggcctcccaaagtgctgrgattagaggcatgagccactgcaccagcccagttctttattaaagtaaaattaaagataatcatggtacttaatgaaggcttacacaggcacaggatgtt

SEQ ID NO: 48977 - DNA, 201 bp, Homo sapiens
catctgggctttgctaccaacaagttgtatagttctgcatcctcaacaactctcatattcacctcccctatttgcattcccactgatgccagaccaaaccwgtccctctttaactctcactgggaccattgcaatagcctcttcttttgcagtgcaatctccctgattgtaactcatttaaaaaaaaaaaagtatcgcact

SEQ ID NO: 48978 - DNA, 201 bp, Homo sapiens
aattttatttaaaatcatgaatgcagtggtttcacattttttaatcttggttctgccacttatcaactgtatctcttggacaagttactgactctttccaraacagttttttcatttgtttgtttccaatatgaatcccagggcttttaccccattagccatctctcacctctcaactagaaataaattccaccaaatcaa

SEQ ID NO: 48979 - DNA, 201 bp, Homo sapiens
agaagtaacttgcctaaggtcacatagcaagtaggcagcagagccaggattcatatcacacctgtgtgaccccacgccccacatctggtgcctaacctcartgcagtaatacgtgacattgggcttccataataaaacaatgcttggtttgaaaaccacagcccattttgtaccacatagggtttctctgtccacacatct

SEQ ID NO: 48980 - DNA, 201 bp, Homo sapiens
tacgtcttaaacatctcatttggctcctctgtttctccactgtaggattctggacatagatttgaagcaaatgaaaggtgaaagggtttgggctctaacaytgtgcaagctgagctcagagaagtaacttgcctaaggtcacatagcaagtaggcagcagagccaggattcatatcacacctgtgtgaccccacgccccac

SEQ ID NO: 48981 - DNA, 201 bp, Homo sapiens
gtcacctgagtggcactatcttggtgaagaggacatggcagttcagccatagtcagtactctcttcgcctgctgtattcagactcatgaaacatcacctcrtaagattgtttgtcctttaccatgagtacgtcttaaacatctcatttggctcctctgtttctccactgtaggattctggacatagatttgaagcaaatga

SEQ ID NO: 48982 - DNA, 201 bp, Homo sapiens
atatccacatatgacatatggatattcttttgtaatatacttccaagtgaaccagcatgtggacagggcttaagacagaggaagtaaccaccagaaaacarttcagccatagaacttacccccaactatgacctcattaataaaaacatctcagtgctttgaaagtatcaattctaatactaattctcatcaagtgcatat

SEQ ID NO: 48983 - DNA, 201 bp, Homo sapiens
tattcaggaaaccctgaaatgggatagaatacagaacattgtctctttttttcccctagagttctgagatcccaaggaagctataattggggaaacatttstatgctccaagaacatagggcaggcaggggttgctactgtaaggtattaagacattggtggggttaaggtcagggagcgaagtgaataggatgtggacca

SEQ ID NO: 48984 - DNA, 201 bp, Homo sapiens
acaaattgctaacctatctattcaggaaaccctgaaatgggatagaatacagaacattgtctctttttttcccctagagttctgagatcccaaggaagctrtaattggggaaacatttgtatgctccaagaacatagggcaggcaggggttgctactgtaaggtattaagacattggtggggttaaggtcagggagcgaag

SEQ ID NO: 48985 - DNA, 201 bp, Homo sapiens
ctaacccacaacagtggtagagacatcactaattaatacaactttacctgaacacagatgggttttatctccaccaacacagtactctaagcagccactaycattgattgtcgttttgccatctaagatgtaaaggatgtagagaagcatcaattatccatgggagatgagaaatagatatatttactgtaatatgaaatt

SEQ ID NO: 48986 - DNA, 201 bp, Homo sapiens
aataaagcaagccttctacattgtccctcttctccccaagcctcctagctgaggcaaaacatatccatgaatgcattatcatataatcagatctactttayaaataatgcatttatatataaataaattgattaattgagcatatattcatggatcaggatggacattaccaggatattagctcatcctactgctctccca

SEQ ID NO: 48987 - DNA, 201 bp, Homo sapiens
tcctttgtagcacacgaacactgtgcctaaggatggtatggactgccccgagcaggaagtttctaagtactctgaagcttctttgataaatcatctgccakacatattctgaattctttagattttaaacacctctccctcagaagccctcaacagtacaggtatggaacagaatacacagaataaagcaagccttctaca

SEQ ID NO: 48988 - DNA, 201 bp, Homo sapiens
gagaatataaccaaggattgtaaatgctttatagtttctcttcaacaacaacatatctttagatccattgaactttggtgggagggtagtggtggggagtrggcaggaaaggaaagaagtaattgaaggtgaaatacttcgagtgtattttaattctcaactttaccagtgccagagtaagcagacattcctgaaagcttg

SEQ ID NO: 48989 - DNA, 201 bp, Homo sapiens
gaatgcttccagtgatggagaatccactaccttctctatctagctattctaaaagtacttacgtgcctcctttaattctgcccccacatattaacacagtytctgtattccacatattacaatttgtgagcattactgtaactacagatttgtttttgctttctgagaaaacctgaagggtaaagactaactcttattaca

SEQ ID NO: 48990 - DNA, 201 bp, Homo sapiens
atcctattgaatgtgactcttcatttttttttctctctgttcatcatgtcctgggatatggtttaccttggctacttaaaggcatatgtaactgagaggargtttaattcagataaaatactatccttgagttgcaaactattttttctaattgaaatgttaaaaataagacttctcagaaattaactaaatcatacagtc

SEQ ID NO: 48991 - DNA, 201 bp, Homo sapiens
tggttgggtgccactgcactgcacagaaggttctccaagtgtgagcttggacccaggcaggcctcaggtcagtggtaacggacgactgcttccgtggtgtyggcaggtggaaatggagggatacagctttgtccggctcatgaatccctgggcattgtcccgcctgctagagcctctgatctctgccccttcttcacctgc

SEQ ID NO: 48992 - DNA, 201 bp, Homo sapiens
ctcttttcctcagattaaaaggggagccatctgcttaaggtggttgggtgccactgcactgcacagaaggttctccaagtgtgagcttggacccaggcagscctcaggtcagtggtaacggacgactgcttccgtggtgttggcaggtggaaatggagggatacagctttgtccggctcatgaatccctgggcattgtccc

SEQ ID NO: 48993 - DNA, 201 bp, Homo sapiens
tttttttttaattagccagtagtgatggcacacatctatagtcccagctactcaggaggctgaggtgggagaattgcttgagcccaggaggtcaaggctgsagcaagcagtaatcatgccactgcactccagcctgggccgcagagtgagaccctgtctcaaaaaaagaacctactagtctacataccacacttcctcatc

SEQ ID NO: 48994 - DNA, 201 bp, Homo sapiens
gtgatggacaaaatttgtccaaggactcacactattattctgtggttggttttagctgcccagtgcccacccctgaagattcctgaacgaggaaacatgayctgccttcattctgcaaaagcattccagcatcagtctagctgcagcttcagttgtgaagagggatttgcattagttggaccggaagtggtgcaatgcaca

SEQ ID NO: 48995 - DNA, 201 bp, Homo sapiens
aaagagaccaagtagagatggatagcttgggttaaaagtttagaaaattagagttaagagggttacacaaatagttacagctttcagcaaacatgacattsctgttaattctacatggaaaataaaaatcactattttgtctcctgcagtgagagagtgtggagaacttgagctccctcaacacgtgctcatgaactgcag

SEQ ID NO: 48996 - DNA, 201 bp, Homo sapiens
ttaattctacatggaaaataaaaatcactattttgtctcctgcagtgagagagtgtggagaacttgagctccctcaacacgtgctcatgaactgcagccaycctctgggaaacttctcttttaactcgcagtgcagcttccactgcactgacgggtaccaagtaaatgggcccagcaagctggaatgcttggcttctggaa

SEQ ID NO: 48997 - DNA, 201 bp, Homo sapiens
tacacttcttatgtcttgcatgtgtgtgtgtttgttttgtagcaggaccattgactatccaggaagccctgacttactttggtggagcggtggcttctacrataggtctgataatgggtgggacgctcctggctttgctaagaaagcgtttcagacaaaaaggtaaataggaaagagtcttctctttgcatcttggttaca

SEQ ID NO: 48998 - DNA, 201 bp, Homo sapiens
cctagaagcattctgctgagaaatcttgtgatagccttattgcaattcttgtctgtgatatgcttcttttctcttgctgattttaggatcctgtctttgtytttgatttttgatagtttgattattatgtcttggtgtagtcttttttggattgaacctgactggagatttttaagcttcctgtacctgaatattaatatt

SEQ ID NO: 48999 - DNA, 201 bp, Homo sapiens
actacagcagctctggagttgagaatatgggttacctttctacagtggctgaactagtgtctggagcaaagactttcacagagagaacttggcttggggtyccagggtgagatctagttcacaacagcagtgactccagtgtctgagacatgaggaggtgcactgcagccacagagccacagtccagagtgtgaatatctg

SEQ ID NO: 49000 - DNA, 201 bp, Homo sapiens
tacggtgaggcttcctttttgttgatattattttggttttatgctagagatgatgccaagaagtaaataaatcatgttgaagtctctccagtgagaatagratggtaccagcccccctctatcatctgtctcctccactcagtgtccctagacacacactctaggtaaaaacattttattcttgggagaaaacattgactc

SEQ ID NO: 49001 - DNA, 201 bp, Homo sapiens
ttccaagagtataaataggagttatggctttctgacttgaaactaaatacttgatacttgattttgctgtctgagatcaatctgaaaagtaataataatcrctaacatttgttgagcatcaattgtgggccaagtgtcatttcaatcactctgtacatattaactcatttcatcctacaacaacccggtgaggcaagttct

SEQ ID NO: 49002 - DNA, 201 bp, Homo sapiens
tgttttatctaagcttcactgttaggctacatgatgttgggatctggggcctgtcctctggctccgcagctgctgttcctcctactagaatttataggggmtctctgagaatagatcatggtaaacctgtcaccccattttccaagactgtacttctctctgggataaatgatggaataaatggaagactgggtaggtgcc

SEQ ID NO: 49003 - DNA, 201 bp, Homo sapiens
gtaagcagtctgggttgggcagaaggcagaaaaccagcagagtcacagaggagatggtgagtttatttttttctgcatgggaagtggttgaagtgagttgragtggtatggagtaaagtcaggcaggtaaaggttcagaaagtgaggaacagcgatagccatggagttttatgttgaattgcctattagattttgtgagta

SEQ ID NO: 49004 - DNA, 201 bp, Homo sapiens
caaataaagccatcgtggtttacagaggctgtgttttatctaagcttcactgttaggctacatgatgttgggatctggggcctgtcctctggctccgcagstgctgttcctcctactagaatttataggggctctctgagaatagatcatggtaaacctgtcaccccattttccaagactgtacttctctctgggataaat

SEQ ID NO: 49005 - DNA, 201 bp, Homo sapiens
gggttgggcagaaggcagaaaaccagcagagtcacagaggagatggtgagtttatttttttctgcatgggaagtggttgaagtgagttggagtggtatggrgtaaagtcaggcaggtaaaggttcagaaagtgaggaacagcgatagccatggagttttatgttgaattgcctattagattttgtgagtacttttaaactt

SEQ ID NO: 49006 - DNA, 201 bp, Homo sapiens
cctcctttttacaatgtcttttgcaatgtcttcttttctactctgaagtaaaatacacagataacaaatattctaattaaaatataaagtaggaataaaaygaaaagtaatttataataaaaacaagatgcaaaaacttaggcgctgtgccagtagatgcaatgaggtcatcagaagcgtgcaccttccacagaatcacta

SEQ ID NO: 49007 - DNA, 201 bp, Homo sapiens
aacatggtgaaacaccatatttactaaacttacaaaaactggctgggcatgttggcatgtgcctgtaatcccagctactcaggaggctgaggcaggacaawctcttgaacccaggaggtggaggtggcagtgagttgagatcacaccactgaactccagcctgggtgacagagcaagacttgtctcaaaaacaaaacaaaa

SEQ ID NO: 49008 - DNA, 201 bp, Homo sapiens
gtggggagtggtggctgccccatcttaggcattcgaagtctgaaagacttcctgcagaacagcagataaatgctaagttggcttggaagtgacctttatgktctcctatagctctgaaataacctgtaagaggtgaatcttggtatttggtgatgcatagaaacagaaaagtatgtcagattaaagcaggggatgcacact

SEQ ID NO: 49009 - DNA, 201 bp, Homo sapiens
agtggtggctgccccatcttaggcattcgaagtctgaaagacttcctgcagaacagcagataaatgctaagttggcttggaagtgacctttatgttctccyatagctctgaaataacctgtaagaggtgaatcttggtatttggtgatgcatagaaacagaaaagtatgtcagattaaagcaggggatgcacactgacttg

SEQ ID NO: 49010 - DNA, 201 bp, Homo sapiens
gcccctagagctatgatactcactaggtgaatatcaacatagccaactccatcttttggcaaagtgtattttagcacaaagcagacatctatctacttatytcatataatattagcaggacaatgccttttaaaggtaaaatgtatctattattcttgctccaagtctaaggtgaacactttcaaaaatttccttagaaaa

SEQ ID NO: 49011 - DNA, 201 bp, Homo sapiens
ttcaccatgttggccaggctggtcttgaactcctgacctcaggtgattcacccgccttggcctcccaaagtactgggattacaggcgtgagccactgcgcytagcctctgtgtgttaagtgctggaactatagtttacagtagcattttatcctcccaacataccctatcaggaaaaattattattgtcatccttatttca

SEQ ID NO: 49012 - DNA, 201 bp, Homo sapiens
ttagataaaacatataatagttataacaggctattttaagctgataaaatttaacttcaaggataaaaaaactccacacttttactctccctccacatttwataggtttttaatatttttcagactttatgtttttgatgttataatttacatcttttatattgtgtatctgttaacttattgtggttataattattttta

SEQ ID NO: 49013 - DNA, 201 bp, Homo sapiens
tattttaagctgataaaatttaacttcaaggataaaaaaactccacacttttactctccctccacattttataggtttttaatatttttcagactttatgyttttgatgttataatttacatcttttatattgtgtatctgttaacttattgtggttataattatttttaatagttttgtcttttaaccttcattctaaag

SEQ ID NO: 49014 - DNA, 201 bp, Homo sapiens
taggtcattgaaagttatatagtatttatctggaactgatgttaaaaaaaatagagagccaaaaattatagtagtcatcttgtctctgtaaaatgtaattmaataaatatgtcatgtacactgtatatacataagcaaacatgcaaataaaaaagcagcctactcaaaggttacaataatgttgcaacaattctggtagta

SEQ ID NO: 49015 - DNA, 201 bp, Homo sapiens
tctgaccttttacattctgcctcatttattggcaatgttaggttacaaaagaaactataatctctttcacctccaatccacatgttgtttctcttgcattmtttcttttctgcagctgtgaaatgctcagaactacatgttaataagccaatagcgatgaactgctccaacctctggggaaacttcagttatggatcaatc

SEQ ID NO: 49016 - DNA, 201 bp, Homo sapiens
taattcatattcaacttccacgctttaaccttctacttttcccctttccctcagcaccaatgaccttaccaagtagttgtctaatttctacttgaatgctkccagtgatggagaatccactaccttctctatctagctattctaaaagtacttacgtgcctcctttaattctgcccccacatattaacacagtttctgtat

SEQ ID NO: 49017 - DNA, 201 bp, Homo sapiens
ttattatacttctttgcaaaataaaaatataaaatttcaattttctacaactgtaagtctctatgtgttaaaatgtttttcttttctattgagttagcatkacaactactttcagtacacaattaaataaagtaaatatactgcaagttttgacaagtaacttaaacctttatatttaaattgctattaaagattcatctc

SEQ ID NO: 49018 - DNA, 201 bp, Homo sapiens
tagggttctagctttatatgattttgtgattatgaacaaatcatctttaaacaatccttataaatgaaaaactcgtcgtacacattgtttgaattcatatsatctgtaactttttaatcagatagattattttccaatagaaattgttcagatcaaaatagacatacctcagtatgaatacacagcatacatagtaaaaac

SEQ ID NO: 49019 - DNA, 201 bp, Homo sapiens
ttctacaactgtaagtctctatgtgttaaaatgtttttcttttctattgagttagcatgacaactactttcagtacacaattaaataaagtaaatatactrcaagttttgacaagtaacttaaacctttatatttaaattgctattaaagattcatctctaagacaggaggagctttccctcatttgttcatatatccatg

SEQ ID NO: 49020 - DNA, 201 bp, Homo sapiens
ggtcaatcatcatcttcctgccacatggcaagttaatgacaaagctggtgggatcattcaaatggaagaaatagtttgagacagaaagcaatcattgcagwaaatttcaactttcacattgacctttagtcagagaacagtaccatttcccaataaggcagggttgggcaggcagttggcccatgtatatttggctttctg

SEQ ID NO: 49021 - DNA, 201 bp, Homo sapiens
atctgcatggattcaacatactcagcacatggcaaattcaagttttgctttttggaactttatataatttattttttttctgaatgtttttgatccacaaygagttgaatccgtagatgcagaacccttggatacagagagtcggttatttttcagccttgtctctgcctttgcccttcaggacctgaagtccttttcatg

SEQ ID NO: 49022 - DNA, 201 bp, Homo sapiens
gtcttcttgctgattttagatgatgggaaatgccccttgaatcctcacaggtaaggtagaaatgttttatgattgagtaaattttgctaccttaactttawaattcactgtaatatgtcagaatgattacatgcaatgcctgcctcctttttacaatgtcttttgcaatgtcttcttttctactctgaagtaaaatacaca

SEQ ID NO: 49023 - DNA, 201 bp, Homo sapiens
tttattgaaggcctattaagtgctaaactctaggctcagtgctaaggatccaaagctaaaaagaaaacaccgtcggagatttacaacctggcagatgtagmctgtatcatagaaacagacattaccgtacatggcaatgagcacaatggaggcagggatgaggtgctgtgggagcctggaggaaggaacacagagtccacc

SEQ ID NO: 49024 - DNA, 201 bp, Homo sapiens
cgtataatacctaatgcaaagcctacacatcacttcatctgcatggattcaacatactcagcacatggcaaattcaagttttgctttttggaactttatakaatttattttttttctgaatgtttttgatccacaacgagttgaatccgtagatgcagaacccttggatacagagagtcggttatttttcagccttgtctc

SEQ ID NO: 49025 - DNA, 201 bp, Homo sapiens
ggccccacttcccattctgttgcagtggatttatgaattccagatcttctttcatgttagcttgtcagcattcccaggacctttggtgatcctacttgatygcacatcttagagttcttgaaaactttctgggagagaaagactagtcttttgcataatacacttcttatgtcttgcatgtgtgtgtgtttgttttgtagc

SEQ ID NO: 49026 - DNA, 201 bp, Homo sapiens
ctgttttgctgagaaagtacatacagtgggcaatgaggctggaccaactggtaggctccaggtcataaagcatgttattttccatgtgaagaggtagagcytgcccttaagacattttatatgtcatttaatctgagcttgggcaaattacttatgtctccttcttttataaaaggacaggagtaagttagatgacttcca

SEQ ID NO: 49027 - DNA, 201 bp, Homo sapiens
ccctgcagataccagaatccccagatgcccaagtcacttatataaaatggcataatatttgcatataacctacatacattctcctttagacttttaaaccrtctttagattacgtataatacctaatgcaaagcctacacatcacttcatctgcatggattcaacatactcagcacatggcaaattcaagttttgcttttt

SEQ ID NO: 49028 - DNA, 201 bp, Homo sapiens
tccctgcacacctttgctaagccctcagaatggaacaatgacctgtgttcaacctcttggaagttccagttataaatccacatgtcaattcatctgtgacragggatattctttgtctggaccagaaagattggattgtactcgatcgggacgctggacagactccccaccaatgtgtgaaggtaggctgtgggtctgtcc

SEQ ID NO: 49029 - DNA, 201 bp, Homo sapiens
tgaagaggtagagcttgcccttaagacattttatatgtcatttaatctgagcttgggcaaattacttatgtctccttcttttataaaaggacaggagtaarttagatgacttccagggtccctcctaactttgatatcttatgattccaaacctttaacatcaaggatcctcagaagatgacattttcctattctgacatc

SEQ ID NO: 49030 - DNA, 201 bp, Homo sapiens
caggcctagtctgattatagggctagtgttttgaccactgaactacactatcacccagtggcagagcttctgaatctcaggtaagtcacttgtgaatttaytcttttccactccacagattgcagctataactgctaaatgaactttagaaatggcagtgcctggtgatcagatgagagaatatgttggtagaaatctatt

SEQ ID NO: 49031 - DNA, 201 bp, Homo sapiens
atcactaattaatacaactttacctgaacacagatgggttttatctccaccaacacagtactctaagcagccactaccattgattgtcgttttgccatctragatgtaaaggatgtagagaagcatcaattatccatgggagatgagaaatagatatatttactgtaatatgaaattaagtttgattgttggaataattct

SEQ ID NO: 49032 - DNA, 201 bp, Homo sapiens
ttatagcattcctgtttaccacaattctaaaataataaggaaaggcagtatcatctcattttatagataaggaagagacacaagcttaaagaggttaaatwactcgtccagggtcacactgttagtaagtgaaaaggctcagctctatgtcactgaaagttttacttccttacagagtcttcttcagctacattcttcatt

SEQ ID NO: 49033 - DNA, 201 bp, Homo sapiens
tttacaggactaggtaacagtgtcaacaataagctatgctagtccagcttttttttttttccctataagtccagcattttcctgtatatactcttttcagrttcaatttcacagataatgtcaatatttaatgagcactttcaatgtacaaaacactctgctcagctccagaataaaactatgaatgactgagcccaactt

SEQ ID NO: 49034 - DNA, 201 bp, Homo sapiens
atctaattaaactaaagagcttctgcacagcaaaagaaactaccatcagagtgaacaggcaacctacagaatgggagaacatttttgcaatctactcatcygacaaagggctaatatccagaatctacaatgaactcaaacaaatttacaagaaaaaaacaaacaaccccatcaaaaagtgggcaaaggatatgaacagac

SEQ ID NO: 49035 - DNA, 201 bp, Homo sapiens
agataatgtcaatatttaatgagcactttcaatgtacaaaacactctgctcagctccagaataaaactatgaatgactgagcccaacttcgaggagaccayggtataatggggaagaatgacaatcatgtatgaacagcgcaagaacagaggctgtgggagcacattgcaggggcttctacccttagttaaggtgggaagg

SEQ ID NO: 49036 - DNA, 201 bp, Homo sapiens
tagcttcctcagctgtatgctcacatgtttgttgcgcatttaaattgtggacctcctgctcaagagaatattcagaaacggagatgctgattagaggacaytggaaacagatgaccataaggaggtcatctttacttcccaggaaagcagaagaatgagaagagaatagggccatggaggtgggaacctagagaaacactt

SEQ ID NO: 49037 - DNA, 201 bp, Homo sapiens
gcttttagttctttatttactctgaactttctcctcttgttgctgggtgcacatcaagtgaaatacccaaatgtgggctgggcaggaaggtaccatgcagwgtgcaatccactcgctgttgtaatacttctgagagagtgttatcagacaatttccctttttaatgtcctcccacccctccacatctacccctgctgtcag

SEQ ID NO: 49038 - DNA, 201 bp, Homo sapiens
tggggcagtgcaacaatagctgcttcttggtgagggggtgtgaggggtagtgcaactgtgtttccctttttagcatcctgctatgggaatggctgttggayaaaagatgccagtgtcctctgtggagcaggacactgggggcctcagtggctctgtgtcacatgactgacacagatagcctacaaatttctttattcgtag

SEQ ID NO: 49039 - DNA, 201 bp, Homo sapiens
ttgctctttggcttagagacaacctcttttctcactgtatttctttttccacccctaagctgggctaccaatatctgtgccacaccactaacaccaccacygtccagaaacataagggaactaatgtattagctgtaatagcttgtaacatctgggctttgctaccaacaagttgtatagttctgcatcctcaacaactct

SEQ ID NO: 49040 - DNA, 201 bp, Homo sapiens
cctgtgtaaattttgcttcaagttcagagagtggctttaattaacttttaggacctgagaaaatgaggataaggtttttctggtggggtattttcaatcasatagatctcagaggagtagctcttgattgggaacttatagttaaattgcactgatgtttgtcaaagttttagcgggctatggccgggctcagtggctcat

SEQ ID NO: 49041 - DNA, 201 bp, Homo sapiens
aagcaaaaacatcgacataaacaccaacctttagagacaaccacaggaggttcccagacctccatgtggatcccagggtaagaacccttctcgattgcctsctgggctttatgttcagaagcccctctcttggtaccctgaaattaggcttgagctctacagcgaagtgctaaggccccagccctggaatggtttttaata

SEQ ID NO: 49042 - DNA, 201 bp, Homo sapiens; identical to SEQ ID NO: 8603

SEQ ID NO: 49043 - DNA, 201 bp, Homo sapiens
caaaaatcaatgagtacatgtgtattactgtttctttattccttacttcctcatcccttagctttgcagtgccaggatctcccagttccaaatgaggcccrggtgaactgctcccaccccttcggtgcctttaggtaccagtcagtctgcagcttcacctgcaatgaaggcttgctcctggtgggagcaagtgtgctacag

SEQ ID NO: 49044 - DNA, 201 bp, Homo sapiens
agggttggccactgtgatgggagactgggagcctcaccgactccttcgccctacacactcttgtgagctggccccaaagccagggaaatccctagaaatamtctgttcagggagaaaaccacttccacaggaagagtaccactaaatttaaaatcgttgcactccttctgcaatctgtctgaatagaggcaaagcccaggt

SEQ ID NO: 49045 - DNA, 201 bp, Homo sapiens
actgaattaattaattcatagctcctgtttagttgcaaaaggtgctattgttctaatgtattgttcagtgtagagttagtaataatgagaccagtgataatggtaataattattgcttaatgtaggactacctatttcataagcatcatcacattcaatccacacaaatgacccttaagttggttattactatgcccattt

SEQ ID NO: 49046 - DNA, 201 bp, Homo sapiens
ttacctcttacacctttctaagtggaaagctacaattttttatcccaaattttaaaagcaaaagaagattggattttccagtgtattacaaaaattagackgtaaaaataaaattgttacataatttcttaaagtttatccaatggaataaagtactagcatgatctgcaatcctcatcacttaaaagaccacaagcaggc

SEQ ID NO: 49047 - DNA, 201 bp, Homo sapiens
attcatctctaagacaggaggagctttccctcatttgttcatatatccatgaatgaatattacttatcaacaaaattagacaagtttggcatcaatattaytcccatatttcattttcaaggatttaaacattgagaaacttcattcatatgaataagtaaatggaattagaagttttattatagcaatgtctcaattcct

SEQ ID NO: 49048 - DNA, 201 bp, Homo sapiens
gtattgttcagtgtagagttagtaataatgagaccagtgataatggtaataattattgcttaatgtaggactacctatttcataagcatcatcacattcartccacacaaatgacccttaagttggttattactatgcccattttaaaggtgaagaaactgaggctttgagaggttaagtagctagcaaagttcatatagc

SEQ ID NO: 49049 - DNA, 201 bp, Homo sapiens
aagtaaatggaattagaagttttattatagcaatgtctcaattccttgaagtccttccaagttatatgccccaaattatatagtgatttactatcaaaatktagtcagacttgacaacttaatcgggtgctccctcaaagctgatgaaaggaaataaatggaaatcactagacttgaaaacggatttgctgcaatatcatt

SEQ ID NO: 49050 - DNA, 201 bp, Homo sapiens
gcttaatgtaggactacctatttcataagcatcatcacattcaatccacacaaatgacccttaagttggttattactatgcccattttaaaggtgaagaarctgaggctttgagaggttaagtagctagcaaagttcatatagcttgaagtatggagacaggatgcaaacccaggcctagtctgattatagggctagtgtt

SEQ ID NO: 49051 - DNA, 201 bp, Homo sapiens
agaattccacttcagcatttggaatggtgcattttgaaatgtgataggaagaacagcttgtgacacaacacaattcagagaaagcagtggggttaggttcrcaccaaagggttatcgatcactctgcattttgtgcaaataaacagctgtaaatcataacgttatgatactctcagtgtttaatcataggtcctgcagaga

SEQ ID NO: 49052 - DNA, 201 bp, Homo sapiens
cctgaacgaggaaacatgacctgccttcattctgcaaaagcattccagcatcagtctagctgcagcttcagttgtgaagagggatttgcattagttggacyggaagtggtgcaatgcacagcctcgggggtatggacagccccagccccagtgtgtaaaggtgagtttcaggtagttgggatgtataatgtccattgcacc

SEQ ID NO: 49053 - DNA, 201 bp, Homo sapiens
aaatggttcctcttattttcccatatgcctgaacccattaatttttaaccctcagcactgccccctagaaccccaattttcacatggtgttttgcagagtwctaggatacatcagatggactcaggggcctccaagtaagcagaggcagtgtggcaggtggagttctcaagctgtctcttcagagtgcaatgtgagatttc

SEQ ID NO: 49054 - DNA, 201 bp, Homo sapiens
cttgcccttaagacattttatatgtcatttaatctgagcttgggcaaattacttatgtctccttcttttataaaaggacaggagtaagttagatgacttcyagggtccctcctaactttgatatcttatgattccaaacctttaacatcaaggatcctcagaagatgacattttcctattctgacatcattcacactttta

SEQ ID NO: 49055 - DNA, 201 bp, Homo sapiens
cagcaaacatgacattgctgttaattctacatggaaaataaaaatcactattttgtctcctgcagtgagagagtgtggagaacttgagctccctcaacacrtgctcatgaactgcagccaccctctgggaaacttctcttttaactcgcagtgcagcttccactgcactgacgggtaccaagtaaatgggcccagcaagct

SEQ ID NO: 49056 - DNA, 201 bp, Homo sapiens
caatactcttttcctcagattaaaaggggagccatctgcttaaggtggttgggtgccactgcactgcacagaaggttctccaagtgtgagcttggacccargcaggcctcaggtcagtggtaacggacgactgcttccgtggtgttggcaggtggaaatggagggatacagctttgtccggctcatgaatccctgggcatt

SEQ ID NO: 49057 - DNA, 201 bp, Homo sapiens
ggtcttgaagaggtttgtaaaaatcaaactatctaagtaaatgagacttatctgaccaaggtattgttgtcagaatagccttagatttaaagaaagaatartcacttcatttgtctataacccaacatttattgataaataatagtcttatattagagaattaatggggagaaaagaataatgctaagaaaatatgtaact

SEQ ID NO: 49058 - DNA, 201 bp, Homo sapiens
gagcaccttgaagaatataagatcagaattagagaaaactagctgcttaaaactagagggaaattttaatatcatccagctcacctgtctcatcttataamtgatgaaaaggacactcacgaggttttagtttctcaaggccgtggagcaggacagaagcaaagtgaggaccagaaaccagtctcccaaattttaggtgta

SEQ ID NO: 49059 - DNA, 201 bp, Homo sapiens
cttatatttctgtaccatttcttgcttctttttaaaatagcaacaacaatgactcctctgatttcttctcttggccaggagaatcatctcctcaaggatgmtttttaataattttcctcatctggttttctatctctgacactgatagtttttcttaacttccttaaatagctcttgcaggagcctcccttgttatgaagg

SEQ ID NO: 49060 - DNA, 201 bp, Homo sapiens
aaatacttttggggggaaattgtgaattaaaatttaaattcatttattcattcacttggcaagtggttactgagcactgcctcttgagatcctgggatggsagttatggaagactcaaggatgaatcattcttgggttttagacactttcccatccagtagaagagtgagggtatgacatgggacatgacagcacatcagt

SEQ ID NO: 49061 - DNA, 201 bp, Homo sapiens
ggaaatgaaatcctggattgcacccattcaagtaagatagagggagctgcggcaggctacgaggtctctgaagcagagggtgtagagaaaatagggtgacwttgtaagttcttgagtatggctgcctaaatctttgacttctttgtcttcgtgacttgtacctatactcttctctgtaagcttaccatcctcccactgccc

SEQ ID NO: 49062 - DNA, 201 bp, Homo sapiens
ccaaaaaggctctcaccaacgaggctgagaactgggctgataatgaacctaacaacaaaaggaacaacgaggactgcgtggagatatacatcaagagtccrtcagcccctggcaagtggaatgatgagcactgcttgaagaaaaagcacgcattgtgttacacaggtagggccttctctactttgaaactttcctgttaaa

SEQ ID NO: 49063 - DNA, 201 bp, Homo sapiens
ttttaatcttggttctgccacttatcaactgtatctcttggacaagttactgactctttccaaaacagttttttcatttgtttgtttccaatatgaatccmagggcttttaccccattagccatctctcacctctcaactagaaataaattccaccaaatcaatactttttcacaatgttccccagtagattaaaactata

SEQ ID NO: 49064 - DNA, 201 bp, Homo sapiens
aatctaatccatatatctggctgcttaaactaagaacttgttctaacttgtcctgcccctagagctatgatactcactaggtgaatatcaacatagccaaytccatcttttggcaaagtgtattttagcacaaagcagacatctatctacttatttcatataatattagcaggacaatgccttttaaaggtaaaatgtatc

SEQ ID NO: 49065 - DNA, 201 bp, Homo sapiens
ctagtttggttgctctccctaatacctctggtcactgggagctgtgatctcaccaaacccctgccaggaaaagccccagaaaaagcggagggagtgagagycagaggctgctgctgccgtttgcaagaactgcaggggaggaggacgctgccacccacagcctctagagctcattgcagctgggacagcccggagtgtggt

SEQ ID NO: 49066 - DNA, 201 bp, Homo sapiens
aagaatacaaggggtcctggagacaggaaaatatgatcataataataaatttgtgattccttctttctctctttttctctttctttctttttctttctttyttttttttttttgatggagttttgctctcgttgcccaggctggagtaaaatggcatgatatcagctcactgcaaactccaccttccaggttcaagcaatt

SEQ ID NO: 49067 - DNA, 201 bp, Homo sapiens
taatagccaacacttaaacttacacttaacagcgtgataggtattgttccaaacacattaaattcatttaatggtccttacatgtctatgtatttggtgaytattatccttattattcacattgctgagtgtattattctgttctcatgatgctgatagagacatacccgagactggataacttattaaaaaaaaaaaggt

SEQ ID NO: 49068 - DNA, 201 bp, Homo sapiens
tgtctcaaaaaaagaacctactagtctacataccacacttcctcatccccatctgagactatatatattttttctaacatgaggcaatgccaaaaagaggrgctggtgagtgaaagtaagaacagaaagacatggaggcaagtcttatagaataatagccaacacttaaacttacacttaacagcgtgataggtattgttc

SEQ ID NO: 49069 - DNA, 201 bp, Homo sapiens
tatgaagggagtgaaaagcagttattccagattagccttaactctgttaacgcttcttttaattgggaggtctctgaatggaaacattttctcacaacagkcatagcatcacttcctactccaggggtgcaatgtccagccctcaccactcctgggcagggaaccatgtactgtaggcatcatccgggaacctttggtttt

SEQ ID NO: 49070 - DNA, 201 bp, Homo sapiens
ttctcacaacaggcatagcatcacttcctactccaggggtgcaatgtccagccctcaccactcctgggcagggaaccatgtactgtaggcatcatccgggracctttggttttaataccacttgttactttggctgcaacgctggattcacactcataggagacagcactctcagctgcagaccttcaggacaatggacag

SEQ ID NO: 49071 - DNA, 201 bp, Homo sapiens
ttccttctttctctctttttctctttctttctttttctttctttcttttttttttttgatggagttttgctctcgttgcccaggctggagtaaaatggcaygatatcagctcactgcaaactccaccttccaggttcaagcaattctcttgcctcaatctctcgagtaggtgggattacaggtgtccaccacaacgcccgg

SEQ ID NO: 49072 - DNA, 201 bp, Homo sapiens
caaccacaaccactactccaagtgtcatctcccttatgaaatccacaccaatcccattagaagtaatgtgtcacaggcatttcacttctgtccttcctcaygtcacaagctaaagctaatacacaagtactcagagacttaaaggaagaaacatttgcagatgtccaagatgtgttagaaaaatagacatattaaatgtaa

SEQ ID NO: 49073 - DNA, 201 bp, Homo sapiens
tagaagtaatgtgtcacaggcatttcacttctgtccttcctcatgtcacaagctaaagctaatacacaagtactcagagacttaaaggaagaaacatttgyagatgtccaagatgtgttagaaaaatagacatattaaatgtaaaacctgctatagaaattggtaaactagaagttgcatattatgtgacagtataaacat

SEQ ID NO: 49074 - DNA, 201 bp, Homo sapiens
gttgcatattatgtgacagtataaacattccatattttcataataatttgaacctaaataaaaagttaagccatacatgatatttcctgaagagctatcgycctacacataaagcattgagacctatgtttctttcatttttgtatcccccacaaaacatagcacagtgctttgcaaatgtcactactgataaataacatt

SEQ ID NO: 49075 - DNA, 201 bp, Homo sapiens
attgagacctatgtttctttcatttttgtatcccccacaaaacatagcacagtgctttgcaaatgtcactactgataaataacatttatttgaattaaatytaatttcttgacctttaatttcctatccataaattagaaagaataaccctgaagttccctgaaaatgtagtttaaggaggatgacagtctacttctttca

SEQ ID NO: 49076 - DNA, 201 bp, Homo sapiens
acagtgctttgcaaatgtcactactgataaataacatttatttgaattaaatctaatttcttgacctttaatttcctatccataaattagaaagaataacsctgaagttccctgaaaatgtagtttaaggaggatgacagtctacttctttcaaacttccagtgtccagatatgctgaacacttattaagtatttcaataa

SEQ ID NO: 49077 - DNA, 201 bp, Homo sapiens
gatggcaccagaggctgcagaaggccaagaatcaagctagaaggccacatgtcaccgtggaccttcctgccaccagtcactgtccctcaaatgacccaaasaccaatattcaaatgcgtaattaaaagaattttccccaaatgccgtgttcctctattttatggtttgttcagtaaggtctgtatacatcacattgtttac

SEQ ID NO: 49078 - DNA, 201 bp, Homo sapiens
cgtatatctcactataataaaaaattgaacagcaaaaaaaaaaaaaaagaaaaaacaagaaggcaatagaatagatggctatacaccatgatgctgacacytagtctgagttatggaatgtattgtatatgttatctgggagaaaaagacacaatgagctctttgacacacttaaaacggatcataagggattattcaagc

SEQ ID NO: 49079 - DNA, 201 bp, Homo sapiens
gagtgaaagtgggcagatacatattttttactaaaaggaaaccactcactattcaggtcacacaaaagcataatcacatacacacacacacaccccccccmcacacaccccattgttaagctaggtcaacagtaaatgaatgaatgaatgaatgaatgaatgaatgaacaaatggacaagcaaacagcagaattgaatgtc

SEQ ID NO: 49080 - DNA, 201 bp, Homo sapiens
ttgagtgaaagtgggcagatacatattttttactaaaaggaaaccactcactattcaggtcacacaaaagcataatcacatacacacacacacaccccccmcacacacaccccattgttaagctaggtcaacagtaaatgaatgaatgaatgaatgaatgaatgaatgaacaaatggacaagcaaacagcagaattgaatg

SEQ ID NO: 49081 - DNA, 201 bp, Homo sapiens
ggaataacaaaaggtaattaacatgattatataatttgaatagtgttgtaatagttcataaaatggaaaagccaatttgagcccagaatctgggagatagrcagaactctggactgtaaagaatggcccagcaaagaggaagaaaatgggcattctaagttggtgcaataatatcagcacaggagaaaagacagaatattg

SEQ ID NO: 49082 - DNA, 201 bp, Homo sapiens
catctgcactgagcattggcatgcctttctttatcagatattcactgagaacctactatgggccatgtcctttgtgcttgggaccagggatgagatgaaayggtgcgtgaagccagtcttaggcacatgtccactatagtatagtcaaggtgaggtttgcactgattgacacatatagggtgcattggaatgaagaagatg

SEQ ID NO: 49083 - DNA, 201 bp, Homo sapiens
tccaccacaacgcccggctaattttttatatttttagtagagaagggtttcaccatgttggccaggctggtcttgaactcctgacctcaggtgattcaccygccttggcctcccaaagtactgggattacaggcgtgagccactgcgcctagcctctgtgtgttaagtgctggaactatagtttacagtagcattttatcc

SEQ ID NO: 49084 - DNA, 201 bp, Homo sapiens
tgattcacatggtgagtacacagggaaccatgactggtcattctgtcccctcatcctgtgggtaagtttccaaagttctggagattcgttcctctggtagsaattgttgagtcaaaaccatagaaacacaacccagacaaactgtcatattgtttaaccctaaatcatatcatttctctctagcattttcttatgaaaaat

SEQ ID NO: 49085 - DNA, 201 bp, Homo sapiens
aggcttggtcatgtcgcatgctttatcatccaaaacagcaatgcagcatgggatttagaagcctggaggttaatgaaggttaaaaaaaaaaaaaaaaaaaagtacagtggaaagagctctttcttgtttcaaagtcaagctctgctactgtcattctgaacgtgttatttagatgccccaagcttcagtattttcatgtgc

SEQ ID NO: 49086 - DNA, 201 bp, Homo sapiens
tcttactttcagttattcctctgccattattcattcatatatttatccataaaatgtttattgagtattgagtatgtgccctaccatggctggggattcaracctgagtaagtaatagtccttgcccttgagaagcctctgtcagtagcttcctcagctgtatgctcacatgtttgttgcgcatttaaattgtggacctcc

SEQ ID NO: 49087 - DNA, 201 bp, Homo sapiens
gaggccaaagaaaaagtattgcttgagcccaggggctccaggccagcctgggcaatatagtgagaacttatctctacaaaaaattagccgggtgtggtgaygcatgcctgtagtcccagttactcaggaggctgagatgggaagatcacttgaggccaggaggtggaggtttcagtgaacccagatcatgccactgcactt

SEQ ID NO: 49088 - DNA, 201 bp, Homo sapiens
catttttggaggccaaagaaaaagtattgcttgagcccaggggctccaggccagcctgggcaatatagtgagaacttatctctacaaaaaattagccgggygtggtgatgcatgcctgtagtcccagttactcaggaggctgagatgggaagatcacttgaggccaggaggtggaggtttcagtgaacccagatcatgcca

SEQ ID NO: 49089 - DNA, 201 bp, Homo sapiens
atagtttctcatccccatccctcccatttctttctgtgagcctatgaatcttctgggactgatctggaatatccacatagtttccttttctgccctaagaytcaatcttgttaatgactcagtttcttcttctataaaatggatatagtaataatactctatagtttcatcatgaggattaaataagattttgctgaaaag

SEQ ID NO: 49090 - DNA, 201 bp, Homo sapiens
catcctacaacaacccggtgaggcaagttctgttattctgttttacagttgaggaaacagaggcatagagagcttaagtagtttgcccagtagatagccaraagaggagccaggatgggtctcgggcagtttaacagcacagctgaagtcttaaccactatgccaacagctttttggtcctacacatcccatgggaagagg

SEQ ID NO: 49091 - DNA, 201 bp, Homo sapiens
tggacaaaagatgccagtgtcctctgtggagcaggacactgggggcctcagtggctctgtgtcacatgactgacacagatagcctacaaatttctttattsgtagctatctcctggtgtctcatatatgccagtctcaccggtgattcttctacatggatattctttcttttctccattgtgttgttccaaattctttaac

SEQ ID NO: 49092 - DNA, 201 bp, Homo sapiens
gaggggtagtgcaactgtgtttccctttttagcatcctgctatgggaatggctgttggacaaaagatgccagtgtcctctgtggagcaggacactgggggyctcagtggctctgtgtcacatgactgacacagatagcctacaaatttctttattcgtagctatctcctggtgtctcatatatgccagtctcaccggtgat

SEQ ID NO: 49093 - DNA, 201 bp, Homo sapiens
ctgggatgggagttatggaagactcaaggatgaatcattcttgggttttagacactttcccatccagtagaagagtgagggtatgacatgggacatgacarcacatcagttcagacaaaaagttgaagaattcagaggagaagagttcaggctgtggtgatcagcagagtcttcagagactttacgagttaaatcctggag

SEQ ID NO: 49094 - DNA, 201 bp, Homo sapiens
atgttggctccacctgccatttctcttgtgacaacggctttaagctggaggggcccaataatgtggaatgcacaacttctggaagatggtcagctactccrccaacctgcaaaggtaataatatgtacttgctaagacagttctacttttggaaatttattctacaacaacaaacaattatctagttcttatatgtgaact

SEQ ID NO: 49095 - DNA, 201 bp, Homo sapiens
acaatgactcctctgatttcttctcttggccaggagaatcatctcctcaaggatgatttttaataattttcctcatctggttttctatctctgacactgayagtttttcttaacttccttaaatagctcttgcaggagcctcccttgttatgaagggagtgaaaagcagttattccagattagccttaactctgttaacgc

SEQ ID NO: 49096 - DNA, 201 bp, Homo sapiens
tacttctttcaaacttccagtgtccagatatgctgaacacttattaagtatttcaataaacacatactgacatgccagttgatcacaaatgtagtaataayatttagactaacagtattttaagaaccaaaattttgtaaatagtatatttggaggcaagatttatcaatgcattagcaggtatttgtcggatgctactat

SEQ ID NO: 49097 - DNA, 201 bp, Homo sapiens
gacatgccagttgatcacaaatgtagtaataacatttagactaacagtattttaagaaccaaaattttgtaaatagtatatttggaggcaagatttatcawtgcattagcaggtatttgtcggatgctactatgtgtccatctttgcatcttggttctttggatatcacccttcgagagaatattttcatatatgtgctgt

SEQ ID NO: 49098 - DNA, 201 bp, Homo sapiens
aaacttcagttatggatcaatctgctctttccattgtctagagggccagttacttaatggctctgcacaaacagcatgccaagagaatggccactggtcamctaccgtgccaacctgccaaggtacaattttcatgtgggttaagaagtcactttgatgtggaaaataacaaaatcagtgtttcttccctgtgtctttctc

SEQ ID NO: 49099 - DNA, 201 bp, Homo sapiens
atattccccttataatgagccctcctgaaaatcagtctactggttttccccagtaatttctatccttaatgaccctctctttcatcttgttttttttttttaatcattcattcttgtcttcttgctgattttagatgatgggaaatgccccttgaatcctcacaggtaaggtagaaatgttttatgattgagtaaattttg

SEQ ID NO: 49100 - DNA, 201 bp, Homo sapiens
ataaataggtcattgaaagttatatagtatttatctggaactgatgttaaaaaaaatagagagccaaaaattatagtagtcatcttgtctctgtaaaatgyaattaaataaatatgtcatgtacactgtatatacataagcaaacatgcaaataaaaaagcagcctactcaaaggttacaataatgttgcaacaattctgg

SEQ ID NO: 49101 - DNA, 201 bp, Homo sapiens; identical to SEQ ID NO: 8461

SEQ ID NO: 49102 - DNA, 201 bp, Homo sapiens
tcttgcaggagcctcccttgttatgaagggagtgaaaagcagttattccagattagccttaactctgttaacgcttcttttaattgggaggtctctgaatkgaaacattttctcacaacaggcatagcatcacttcctactccaggggtgcaatgtccagccctcaccactcctgggcagggaaccatgtactgtaggcat

SEQ ID NO: 49103 - DNA, 201 bp, Homo sapiens
tttgtaactacctcttgtcacctagaagaggttgcagcaacttagagggtataacaggtattcagtacataaagcatgaacaataacttagtgtgggtgcraaatgcaatgcaaattacccagagctggtaagtgggatatcgaatatttctttggcatttatttttctttcctttctaaagcagaattccaagggtggat

SEQ ID NO: 49104 - DNA, 201 bp, Homo sapiens
aaactatcgttagattatcaagtgttaatgccaagaattttgtaactacctcttgtcacctagaagaggttgcagcaacttagagggtataacaggtattyagtacataaagcatgaacaataacttagtgtgggtgcaaaatgcaatgcaaattacccagagctggtaagtgggatatcgaatatttctttggcatttat

SEQ ID NO: 49105 - DNA, 201 bp, Homo sapiens
attgtcgtagacatccagcacccttgccccatacccactcaatatcggaagaactcttggttataaaaatcaaaaaacacccctaggggtcatattgcacyctttgaaaactatcgttagattatcaagtgttaatgccaagaattttgtaactacctcttgtcacctagaagaggttgcagcaacttagagggtataaca

SEQ ID NO: 49106 - DNA, 201 bp, Homo sapiens
actgccttggtagtcagtgaaaatagaacactaagcgtgcaataaatgcaaaccttatctgttttctatttttgtaattattcaggagtttttttttttttgccaaagttttagagtaggctcaagaatatgaccacttctcaaagttatgcacaaaagtcattcctgggtataactcttttcctgcatctgcactaatct

SEQ ID NO: 49107 - DNA, 201 bp, Homo sapiens
atatgaactctattgtcgtagacatccagcacccttgccccatacccactcaatatcggaagaactcttggttataaaaatcaaaaaacacccctaggggkcatattgcaccctttgaaaactatcgttagattatcaagtgttaatgccaagaattttgtaactacctcttgtcacctagaagaggttgcagcaacttag

SEQ ID NO: 49108 - DNA, 201 bp, Homo sapiens
gttccaggctcagagatttttaacctgtatgaatatcgagcagatattccaaagttatgtgggatgttggacaattcttttgtgtcctgtaccccttgctrtttataatctagcaatagttttcaaaaagggacagtatgcccccaagggtatttttttatttttgtaatgaacaagagttctactgacattgagtgggca

SEQ ID NO: 49109 - DNA, 201 bp, Homo sapiens
agcattagaactgtggccaacaccagcctaatttttcaacatggtgaacaactccggtaaagagtctgaaaacctgtgataattgtcctttgattcatatrgcaattgcattttaaagatgcaaaaaaatgcttaatatttacatgtaaagtgcttgagttccaggctcagagatttttaacctgtatgaatatcgagcag

SEQ ID NO: 49110 - DNA, 201 bp, Homo sapiens
cacgcaggtggactgatgggggaatgttgtattagtgactcaaagagcattagaactgtggccaacaccagcctaatttttcaacatggtgaacaactccrgtaaagagtctgaaaacctgtgataattgtcctttgattcatatggcaattgcattttaaagatgcaaaaaaatgcttaatatttacatgtaaagtgctt

SEQ ID NO: 49111 - DNA, 201 bp, Homo sapiens
atcaaaatagacatacctcagtatgaatacacagcatacatagtaaaaacatgttaggaaacatctctctgttgaaattactccacgtaagagactgataytttttagtaaagattttacaccatcatctacatttctgtattaaagatctggggcaggggaggacaataacttttcaattgtactaaaaataaataaata

SEQ ID NO: 49112 - DNA, 201 bp, Homo sapiens
ccagattagccttaactctgttaacgcttcttttaattgggaggtctctgaatggaaacattttctcacaacaggcatagcatcacttcctactccagggktgcaatgtccagccctcaccactcctgggcagggaaccatgtactgtaggcatcatccgggaacctttggttttaataccacttgttactttggctgcaa

SEQ ID NO: 49113 - DNA, 201 bp, Homo sapiens
agtgcccagaactctttgccccagagcagggcagcctggattgttctgacactcgtggagaattcaatgttggctccacctgccatttctcttgtgacaayggctttaagctggaggggcccaataatgtggaatgcacaacttctggaagatggtcagctactccaccaacctgcaaaggtaataatatgtacttgctaa

SEQ ID NO: 49114 - DNA, 201 bp, Homo sapiens
catcaagtgcccagaactctttgccccagagcagggcagcctggattgttctgacactcgtggagaattcaatgttggctccacctgccatttctcttgtracaacggctttaagctggaggggcccaataatgtggaatgcacaacttctggaagatggtcagctactccaccaacctgcaaaggtaataatatgtactt

SEQ ID NO: 49115 - DNA, 201 bp, Homo sapiens
gcccagggttctaagctagttgatggtggagccagtttcacactcatgttgattccaaagttggtgttttttagccatgtaaactaccacattctttgctstacatttttatgagacaatttgagaatataaccaaggattgtaaatgctttatagtttctcttcaacaacaacatatctttagatccattgaactttggt

SEQ ID NO: 49116 - DNA, 201 bp, Homo sapiens
ttgatactctagccatcaagtgcccagaactctttgccccagagcagggcagcctggattgttctgacactcgtggagaattcaatgttggctccacctgycatttctcttgtgacaacggctttaagctggaggggcccaataatgtggaatgcacaacttctggaagatggtcagctactccaccaacctgcaaaggta

SEQ ID NO: 49117 - DNA, 201 bp, Homo sapiens
ccagattgctggaagacaaatgtacccaacgccatcatattggtagaaagggcataggaaagaacttaaaatgatatatccaggacgaatgtatccattasgcacagtagacacagacgcacaaaattttcaaagacccacacacgtctgaatttcttttataattattttctttgaagtcaaagaaaatgttttaatata

SEQ ID NO: 49118 - DNA, 201 bp, Homo sapiens
gtgtaacatttccattattaactgctaggtggtgatgatgtggccttgcctgcaaagcagaagtcaggactgctgaaaaatgtttacgaactgttatggartcaattccctatgctacctgctggaaaaacaaaaataatctgatgctatccctctcccaaaaagtgggtagttgagtgtcctacaaaaagcctgaatggc

SEQ ID NO: 49119 - DNA, 201 bp, Homo sapiens
agaaaaccacttccacaggaagagtaccactaaatttaaaatcgttgcactccttctgcaatctgtctgaatagaggcaaagcccaggttcaaaggcaagyactcaggtccccttcatgaaggctgcagagttgtgctcttcagcagcaatatttttgctcctatacctccaaaaatatcctggaacactatgttacctct

SEQ ID NO: 49120 - DNA, 201 bp, Homo sapiens
ggaaagcaacgcccacgcaggtggactgatgggggaatgttgtattagtgactcaaagagcattagaactgtggccaacaccagcctaatttttcaacatrgtgaacaactccggtaaagagtctgaaaacctgtgataattgtcctttgattcatatggcaattgcattttaaagatgcaaaaaaatgcttaatatttac

SEQ ID NO: 49121 - DNA, 201 bp, Homo sapiens
caaacaaacaaacaaacaggttaaaatgggaaacatctctttttggaaattttgtttaaaccaaatcttatttaaaagtttaaacaaacaagtcaaagcasgaaacagtgggtagggttggccactgtgatgggagactgggagcctcaccgactccttcgccctacacactcttgtgagctggccccaaagccagggaaa

SEQ ID NO: 49122 - DNA, 201 bp, Homo sapiens
taaatattgtcgaatgtttaatttagcctaaaacactttctacctttcagggagaaactgttcccaatattccccttataatgagccctcctgaaaatcaktctactggttttccccagtaatttctatccttaatgaccctctctttcatcttgttttttttttttaatcattcattcttgtcttcttgctgattttaga

SEQ ID NO: 49123 - DNA, 201 bp, Homo sapiens
tgaatcttggtatttggtgatgcatagaaacagaaaagtatgtcagattaaagcaggggatgcacactgacttgcattttcctttcttagatgttgtgccktcatcaaaagcactgtaccagtcctctaaaaccttcaaatgtttaaaacaagttgtctcgctctctctcactttgttttatcttgtgtggtagagaattt

SEQ ID NO: 49124 - DNA, 201 bp, Homo sapiens
aatagattttttggtatgcatcttgattacatacttagcataaattcttgggtccaaaagcatgataacttaaaaattattgacacatgttgccaagatgytcaacaaaggtttagcatttcctaataaaatccttcatgtgccgttataattaaatgacactttttcttatcttctatgttaaacaagcccaattcagga

SEQ ID NO: 49125 - DNA, 201 bp, Homo sapiens
gaaggacaaatggccactcatgccccaatatttttaataataaatacattcatttgttggggatgggagcttttttcctcagcttctcccaatttgatttyaggctttgaagttttctatggccaaataagaggaaaatgctgcagccatagctgaaaattcaactatgagagtctgttatttggataaaaatatgctacc

SEQ ID NO: 49126 - DNA, 201 bp, Homo sapiens
cctgacctcaagtgatctgcccaccttggcctcccaaagtgctgggattagaggcatgagccactgcaccagcccagttctttattaaagtaaaattaaasataatcatggtacttaatgaaggcttacacaggcacaggatgttattctaatgacccagtctctgactcctttccagcaacttccagttgaaccagcctt

SEQ ID NO: 49127 - DNA, 201 bp, Homo sapiens
tttttatttaacatcatacattgagacctctctcctatctttacaagttaaaatatattatttttagtgacctttaacattcttttcatggatccaccatmattaatttccaccctcaattaatggcatttgtgtttgttttcaatattccgctcttacaaataatgtcttcacaaaaatctctaaatagattttttggta

SEQ ID NO: 49128 - DNA, 201 bp, Homo sapiens
aggcaagagctcctagaccttaatctctatgatcatgtaggaatcactctaatcttgatgtttcccccaagtcctttctttgactttgagacatttccagrggaccctctaacagtggagaaggacaaatggccactcatgccccaatatttttaataataaatacattcatttgttggggatgggagcttttttcctcag

SEQ ID NO: 49129 - DNA, 201 bp, Homo sapiens
acacctactagcctctggtacctccttgtgtgaaaagttaggtcaaggcatttgcttcttccactttctctctgcttttctcttcaccctgcaatcattawtagtttttttgcttgtttgtttgttttgttttttgagaaagagtctcactctgttgccaaggctggagtgtctcggctcactgccacctctgccttctgg

SEQ ID NO: 49130 - DNA, 201 bp, Homo sapiens
atggagtttttacaaacgctgcatttgacccgagtccttaaggtaagatccctataaagatatttttgaaggaaatagaacactagggaaaaatggaagaytataaagcttaacttttctttacataatcatatattaaattttaagtatgtattaaattttcaggcatgaaggaaattgtgttggcagtaggacacaggt

SEQ ID NO: 49131 - DNA, 201 bp, Homo sapiens
atgcctaaaccagactggcaggtcagaaagcctttttcaagcttagctttgaagaatgagaggcatttagccaaggggaaaatggaaatagagttccatcrgagaaaatggcatgtagaaagacatgaaagtgtaaaatcaatgagaagatggtatgtttcgcagttcagtgcatctgaatcaaaaggggattatggagga

SEQ ID NO: 49132 - DNA, 201 bp, Homo sapiens
aacttatctctacaaaaaattagccgggtgtggtgatgcatgcctgtagtcccagttactcaggaggctgagatgggaagatcacttgaggccaggaggtrgaggtttcagtgaacccagatcatgccactgcacttcagcctgggcaacagagcaagaccctgtcccccagccccacaaaaaaaatcataccaccattaa

SEQ ID NO: 49133 - DNA, 201 bp, Homo sapiens
ggcttctggtatgaattcttccaatattttctccgcttttcctcctatgcaattaatatttttatgatgtatatacaattttaacaataaagttgaatggrtaaaagactagacagttctacattatttgccatacctttcactttgtatagactttcaacatttgagtgaaagtgggcagatacatattttttactaaaa

SEQ ID NO: 49134 - DNA, 201 bp, Homo sapiens
tgatgtttgtcaaagttttagcgggctatggccgggctcagtggctcatgcctgtaatcccagcactttgggaggccgaggcgcatagatcacttgaagtygagagttcaagagcagcctggccaacatggtgaaacaccatatttactaaacttacaaaaactggctgggcatgttggcatgtgcctgtaatcccagcta

SEQ ID NO: 49135 - DNA, 201 bp, Homo sapiens
aggtgaaatcagtgccggtagtgaagtgtagtaagtgtgttaggacacaaatacaacctaggtattattagaacatagactagggatgcctaaaccagacyggcaggtcagaaagcctttttcaagcttagctttgaagaatgagaggcatttagccaaggggaaaatggaaatagagttccatcagagaaaatggcatgt

SEQ ID NO: 49136 - DNA, 201 bp, Homo sapiens
cagcatttttggaggccaaagaaaaagtattgcttgagcccaggggctccaggccagcctgggcaatatagtgagaacttatctctacaaaaaattagccrggtgtggtgatgcatgcctgtagtcccagttactcaggaggctgagatgggaagatcacttgaggccaggaggtggaggtttcagtgaacccagatcatg

SEQ ID NO: 49137 - DNA, 201 bp, Homo sapiens
tacagcacaattataatattggaaaattctgaatttgactgtatttttatttttacctgtgacttttatactttcgtagattttcatgtaattaattaacrtccctttctttcagcttgaagaattccctttaacatttcttgtaaggcaggtctcgtgttgatgaactacctcagcttttatttgtttgggaaagtcttt

SEQ ID NO: 49138 - DNA, 201 bp, Homo sapiens
ggaaggaaaaatccagtaggggagacaggtgaaatcagtgccggtagtgaagtgtagtaagtgtgttaggacacaaatacaacctaggtattattagaacwtagactagggatgcctaaaccagactggcaggtcagaaagcctttttcaagcttagctttgaagaatgagaggcatttagccaaggggaaaatggaaata

SEQ ID NO: 49139 - DNA, 201 bp, Homo sapiens
ttgtctcaaaaacaaaacaaaaaaaaagttttagtgggctaaggagcaggtctggattttcgtccatttataccttttaaccaccttatgtggcttccagkccttactcttcttttcattacctgtttttcaaaatgcaactaaaatagttcagactctcctgggctagccaccagctcttagaatgtgcatcttcagaga

SEQ ID NO: 49140 - DNA, 201 bp, Homo sapiens
tcatttattcatcaactctgttagagtgtgagactcataatgatggtttctgatattaaggaaggaaaaatccagtaggggagacaggtgaaatcagtgcyggtagtgaagtgtagtaagtgtgttaggacacaaatacaacctaggtattattagaacatagactagggatgcctaaaccagactggcaggtcagaaagc

SEQ ID NO: 49141 - DNA, 201 bp, Homo sapiens
gttcttgaaaactttctgggagagaaagactagtcttttgcataatacacttcttatgtcttgcatgtgtgtgtgtttgttttgtagcaggaccattgacyatccaggaagccctgacttactttggtggagcggtggcttctacgataggtctgataatgggtgggacgctcctggctttgctaagaaagcgtttcagac

SEQ ID NO: 49142 - DNA, 201 bp, Homo sapiens
ctccttgccttataaagtagtggaaattaaacccagtgactgtgtaggtaatcacccctcctcttcagtgttcagtttgtgaaatgaaaccttttgcttcrttataatctctgtttaacagaccttgaagtttcaaaatgttttaaactgggagttatttcatgcagatttctaatttattatctcagaagacctttgctt

SEQ ID NO: 49143 - DNA, 201 bp, Homo sapiens
aagtgggtagttgagtgtcctacaaaaagcctgaatggcagaatattcgaaatctagaaagaaaagattatgctgcgcctcagggtgtagatatgatgagyaatttttttctttcttttatttttttaaggaaatgataattatttaaatttctttggtctcatttccagagacctgtccttttcctggtctcctcattca

SEQ ID NO: 49144 - DNA, 201 bp, Homo sapiens
actgaattaaataaactgggcaaatgctaattttgcatccaacaatgtagtttatcattctgagggtttagaaagcaccctatttgattggttagatgctrccttcttttcaagtttattttcaatacagttttgttagtatgtttgtgttggcttatatattggttaattcaaaggcaccaggcacttgctccctcatta

SEQ ID NO: 49145 - DNA, 201 bp, Homo sapiens
ctggtgtctgatgaacagtgcccatggagtggccaagagccaaggcctgaagcatgggcatgcatggagggaccacagcaccagattcaattgtagcaatrgtaccagtgcccaaggcacaggcatacttactatcacattgataatggtgtgtaaaatgcaggtacttataaagcagctaaggagccagggactttactg

SEQ ID NO: 49146 - DNA, 201 bp, Homo sapiens
gtgcccagcttccgttggcttatcattgcacttagaataaaatctcatccccttgttttggatcccaaagcccgatgtgatctgtcactacccccggctcrtatttttctctccattgctcattccattctggccacactaatgtcttcatgttctttgaacacactgcagtttgcttccaccttaaggcctttgaaatag

SEQ ID NO: 49147 - DNA, 201 bp, Homo sapiens
ctgacatgtcataattactggaaaatgggcactggaaaatcacattgtaattaattcaaagcatgttttccaaatgtactactttaaattggagcttatakcataatccaaggaaacctttgtgtgtgtactgttcccacattgctcagcctgggatatccaggagtaattcaccttgcgcctgcctccagaccatcttcc

SEQ ID NO: 49148 - DNA, 201 bp, Homo sapiens
gggttggccactgtgatgggagactgggagcctcaccgactccttcgccctacacactcttgtgagctggccccaaagccagggaaatccctagaaatackctgttcagggagaaaaccacttccacaggaagagtaccactaaatttaaaatcgttgcactccttctgcaatctgtctgaatagaggcaaagcccaggtt

SEQ ID NO: 49149 - DNA, 201 bp, Homo sapiens
gttaaaatgtttttcttttctattgagttagcatgacaactactttcagtacacaattaaataaagtaaatatactgcaagttttgacaagtaacttaaamctttatatttaaattgctattaaagattcatctctaagacaggaggagctttccctcatttgttcatatatccatgaatgaatattacttatcaacaaaa

SEQ ID NO: 49150 - DNA, 201 bp, Homo sapiens
aataaacttggagattgtgacactcttaatttgatactctagccatcaagtgcccagaactctttgccccagagcagggcagcctggattgttctgacacycgtggagaattcaatgttggctccacctgccatttctcttgtgacaacggctttaagctggaggggcccaataatgtggaatgcacaacttctggaagat

SEQ ID NO: 49151 - DNA, 201 bp, Homo sapiens
gaaaacggatttgctgcaatatcatttacaatattcaaattcttaatacctataccaatatttcgaatcatctctggcatacgaatgtatttatatccaarggcaaagctctggaataaataagaaattagtaaaaggtataatttttctcttataaagtgggagaaaggtgtattttaggcagattgtttttaagaaagt

SEQ ID NO: 49152 - DNA, 201 bp, Homo sapiens
ctctcagtgtttaatcataggtcctgcagagatcagcagcttataagaacacaaaatatgcctacttaccaaagtcaagattcagaagctcccagatgaaragttctaggcttatgagataactctactctctgggacacattaactggtttgagttgagttctccctggtatctggtcaggctgtagtcaaaagtgcatg

SEQ ID NO: 49153 - DNA, 201 bp, Homo sapiens
atgttggccaggctggtcttgaactcctgacctcaggtgattcacccgccttggcctcccaaagtactgggattacaggcgtgagccactgcgcctagcckctgtgtgttaagtgctggaactatagtttacagtagcattttatcctcccaacataccctatcaggaaaaattattattgtcatccttatttcacagatg

SEQ ID NO: 49154 - DNA, 201 bp, Homo sapiens
agagcccagatctatgtgtgagaaatttaaggattgtagccagttggtttgaggcatgggaaaactgtccaagtccagattgctggaagacaaatgtaccyaacgccatcatattggtagaaagggcataggaaagaacttaaaatgatatatccaggacgaatgtatccattaggcacagtagacacagacgcacaaaat

SEQ ID NO: 49155 - DNA, 201 bp, Homo sapiens
gccatcatattggtagaaagggcataggaaagaacttaaaatgatatatccaggacgaatgtatccattaggcacagtagacacagacgcacaaaattttyaaagacccacacacgtctgaatttcttttataattattttctttgaagtcaaagaaaatgttttaatatatagtgatatattcatctttgtaccagtgca

SEQ ID NO: 49156 - DNA, 201 bp, Homo sapiens
gcctttaggtaccagtcagtctgcagcttcacctgcaatgaaggcttgctcctggtgggagcaagtgtgctacagtgcttggctactggaaactggaattytgttcctccagaatgccaaggtaagagtgtattctttctaacatcatggaaataaattgtaggcagtatttttaaaggctggattttagaggtgacaact

SEQ ID NO: 49157 - DNA, 201 bp, Homo sapiens
agaaagggcataggaaagaacttaaaatgatatatccaggacgaatgtatccattaggcacagtagacacagacgcacaaaattttcaaagacccacacaygtctgaatttcttttataattattttctttgaagtcaaagaaaatgttttaatatatagtgatatattcatctttgtaccagtgcagttgcaaaatagaa

SEQ ID NO: 49158 - DNA, 201 bp, Homo sapiens
tgaaggaaccatggactgtgttcatccgctcactgcttttgcctatggctccagctgtaaatttgagtgccagcccggctacagagtgaggggcttggacrtgctccgctgcattgactctggacactggtctgcacccttgccaacctgtgagggtaggatttttcattagcaacctccattctgtccaagaaggaatca

SEQ ID NO: 49159 - DNA, 201 bp, Homo sapiens
ttctgagccctatcttaataagggagtattcagacatggaagaagtagagtagttaatgaaagacaaacagccaagaagaatggaaagactataagattgyagatcaggatatctgatttcccacccgggttctgccacaaacctactgtgtttcactcattcaacaagtatttattgaaggcctattaagtgctaaactc

SEQ ID NO: 49160 - DNA, 201 bp, Homo sapiens
accattgctctctgtgtggcttttctcctttctcagtatctttctctttatccttggttattctctccagctgtgcagtgtcagcacctggaagcccccartgaaggaaccatggactgtgttcatccgctcactgcttttgcctatggctccagctgtaaatttgagtgccagcccggctacagagtgaggggcttggac

SEQ ID NO: 49161 - DNA, 201 bp, Homo sapiens
tgaaataatataaatcaatatgtttaagaattcagatgcaatcatgtatactttcttgatggactatagaagaacaccaatgaatacccatatgtgatagmactgccttggtagtcagtgaaaatagaacactaagcgtgcaataaatgcaaaccttatctgttttctatttttgtaattattcaggagtttttttttttt

SEQ ID NO: 49162 - DNA, 201 bp, Homo sapiens
tggcactcactctcctttactctagaactaacaaaccagaaagaagtggcagcatggacttatcattacagcacaaaagcatactcatggaatatttcccrtaaatactgccagaatcgctacacagacttagtggccatccagaataaaaatgaaattgattacctcaataaggtcctaccctactacagctcctactac

SEQ ID NO: 49163 - DNA, 201 bp, Homo sapiens
ttgccaggctgttctcgaactcctgacctcaagtgatctgcccaccttggcctcccaaagtgctgggattagaggcatgagccactgcaccagcccagttytttattaaagtaaaattaaagataatcatggtacttaatgaaggcttacacaggcacaggatgttattctaatgacccagtctctgactcctttccagca

SEQ ID NO: 49164 - DNA, 201 bp, Homo sapiens
ttgagatcacaccactgaactccagcctgggtgacagagcaagacttgtctcaaaaacaaaacaaaaaaaaagttttagtgggctaaggagcaggtctggrttttcgtccatttataccttttaaccaccttatgtggcttccagtccttactcttcttttcattacctgtttttcaaaatgcaactaaaatagttcagac

SEQ ID NO: 49165 - DNA, 201 bp, Homo sapiens
gaattacttttgtcctgtctttttgcatgtcatacttctgaattggttaacttaaatgagcagttattcctctcttccttctactctccttggcatcctcstctatttcaaaggtatgaacttattggatcagagagttctttgagattttgatgaaagttacaacttgtctttcccagatgaaagcaaaaacatcgacat

SEQ ID NO: 49166 - DNA, 201 bp, Homo sapiens
taagttggcttggaagtgacctttatgttctcctatagctctgaaataacctgtaagaggtgaatcttggtatttggtgatgcatagaaacagaaaagtaygtcagattaaagcaggggatgcacactgacttgcattttcctttcttagatgttgtgccttcatcaaaagcactgtaccagtcctctaaaaccttcaaat

SEQ ID NO: 49167 - DNA, 201 bp, Homo sapiens
tgcacatggttaagctacttccaattttcctcagactttccaagagtatcccacatagtcccagggtccgaaatcctgcagtctgtggctatggaggaacmaggcaggtctctgtttttgagcacctttctgtgggactccagaaaaaagtaccgcatacacctgattcatcctactgctttgctttactatagcacactt

SEQ ID NO: 49168 - DNA, 201 bp, Homo sapiens
aataagtgtttcacaatgaatcaggcagaatctccttgccttataaagtagtggaaattaaacccagtgactgtgtaggtaatcacccctcctcttcagtrttcagtttgtgaaatgaaaccttttgcttcgttataatctctgtttaacagaccttgaagtttcaaaatgttttaaactgggagttatttcatgcagatt

SEQ ID NO: 49169 - DNA, 201 bp, Homo sapiens
tatgcacctagataaaatgcacatggttaagctacttccaattttcctcagactttccaagagtatcccacatagtcccagggtccgaaatcctgcagtcygtggctatggaggaaccaggcaggtctctgtttttgagcacctttctgtgggactccagaaaaaagtaccgcatacacctgattcatcctactgctttgc

SEQ ID NO: 49170 - DNA, 201 bp, Homo sapiens
tggcttctttttttgaaagagctttgttgagtgaacggaatggtctccattaatttattgctgagagaaacagacaatactggggtagagtcactggtccrgtttttcaaatctaggaattgaggtgcagagaggtcaatcatcatcttcctgccacatggcaagttaatgacaaagctggtgggatcattcaaatggaag

SEQ ID NO: 49171 - DNA, 201 bp, Homo sapiens
gagcctgacacatagtaagtgattagtaaatgttagccattattgttacaataaaaagaaaattcttaggaatagtggggtttaggattcagggaagatcyaaggatagctaggcattttgaactcagcaatgttatatgctcatggataagatgcacgtggttaggctacttctaattcagggaagatccaaggatagct

SEQ ID NO: 49172 - DNA, 201 bp, Homo sapiens
gggatacagtgttcaaagaactgacaaggtccctgctttcctgcagctgacattatacatattcttcagtttaaagttgtaattctgggagattatgaaamagttatttttgtgaaaatgttcacagatgacttcatgtctaggagttacaccagtagacatgtttcaaaaaggtttagtaaattgatttgatgtgtcaga

SEQ ID NO: 49173 - DNA, 201 bp, Homo sapiens
ctctctgagaatagatcatggtaaacctgtcaccccattttccaagactgtacttctctctgggataaatgatggaataaatggaagactgggtaggtgcyctgggacaagcttacaattgaatagtttctcatccccatccctcccatttctttctgtgagcctatgaatcttctgggactgatctggaatatccacata

SEQ ID NO: 49174 - DNA, 201 bp, Homo sapiens
tatatcataatccaaggaaacctttgtgtgtgtactgttcccacattgctcagcctgggatatccaggagtaattcaccttgcgcctgcctccagaccatsttccatggaagggggtgaccccttgcctcttggcaaccactatttctaagctgccaacattactcttgcattatcaacattctaacttcatgggaagggc

SEQ ID NO: 49175 - DNA, 201 bp, Homo sapiens
actcttttcctgcatctgcactaatctccattccagcagcatccttgataactccacaaatgtcattcatcccatgtttgctgagtgcccaccatatgccrgatctgggttaggcttccatgtaactcatctaggctgcccctcaaacaggtaaacccacttctttacatgatccagagccaaattcttagtatgtaaggg

SEQ ID NO: 49176 - DNA, 201 bp, Homo sapiens
cagaaggctgccggaatagtaaacattcactgacatgtcataattactggaaaatgggcactggaaaatcacattgtaattaattcaaagcatgttttccraatgtactactttaaattggagcttatatcataatccaaggaaacctttgtgtgtgtactgttcccacattgctcagcctgggatatccaggagtaattc

SEQ ID NO: 49177 - DNA, 201 bp, Homo sapiens
atatgaccacttctcaaagttatgcacaaaagtcattcctgggtataactcttttcctgcatctgcactaatctccattccagcagcatccttgataactscacaaatgtcattcatcccatgtttgctgagtgcccaccatatgccggatctgggttaggcttccatgtaactcatctaggctgcccctcaaacaggtaa

SEQ ID NO: 49178 - DNA, 201 bp, Homo sapiens
ccctgtctcaaaaaaagaacctactagtctacataccacacttcctcatccccatctgagactatatatattttttctaacatgaggcaatgccaaaaagwggggctggtgagtgaaagtaagaacagaaagacatggaggcaagtcttatagaataatagccaacacttaaacttacacttaacagcgtgataggtattg

SEQ ID NO: 49179 - DNA, 201 bp, Homo sapiens
ttcttgatggactatagaagaacaccaatgaatacccatatgtgatagcactgccttggtagtcagtgaaaatagaacactaagcgtgcaataaatgcaamccttatctgttttctatttttgtaattattcaggagtttttttttttttgccaaagttttagagtaggctcaagaatatgaccacttctcaaagttatgc

SEQ ID NO: 49180 - DNA, 201 bp, Homo sapiens
ggctggagcaagcagtaatcatgccactgcactccagcctgggccgcagagtgagaccctgtctcaaaaaaagaacctactagtctacataccacacttcytcatccccatctgagactatatatattttttctaacatgaggcaatgccaaaaagaggggctggtgagtgaaagtaagaacagaaagacatggaggcaag

SEQ ID NO: 49181 - DNA, 201 bp, Homo sapiens
agataatttactaaatctatttgaaataatataaatcaatatgtttaagaattcagatgcaatcatgtatactttcttgatggactatagaagaacaccartgaatacccatatgtgatagcactgccttggtagtcagtgaaaatagaacactaagcgtgcaataaatgcaaaccttatctgttttctatttttgtaatt

SEQ ID NO: 49182 - DNA, 201 bp, Homo sapiens
acgtcctaaaatatggtgaactggtgccccctaaaactctggcccagctgacatctccatttttttcttcattcccccaacatttctctgaatctgtgggrcttcctagttttattcctaaagtttgagtttacaatattcaactcagatacatttattattcatactatatcttctttccagaaaattattgagaaaact

SEQ ID NO: 49183 - DNA, 201 bp, Homo sapiens
gtctctgcctttgcccttcaggacctgaagtccttttcatgagcctaagcagtgcttgaggttcttgtgccaactttgatgatgccacctgcatgatggaktgcttgtacacagtttccgtatccctcctgtccctgcctgttggaccactttcatgatacagactgctgaattcctaatcccttaacactgtctgtcatt

SEQ ID NO: 49184 - DNA, 201 bp, Homo sapiens
tggttcttaaatgctctgagtctgtaaaaaccagaggtcaaagcccagagcaaagaggtagtctttacactttgaaaagtttcagaaatagcctggaaatraaatgctttatcaaggaagagcatgaggaaaccaatctttatcagaactgaggtcactcagggcttaattgtgctcaggaattcactttggctgcactca

SEQ ID NO: 49185 - DNA, 201 bp, Homo sapiens
tgcaatgtgagatttcattttgggggatggctctaccgatagttccactttagttagaatgccggttccctgggccctctgggatgtggcctctgcctagytgttcctcagtatctgcagggggaattggttccaggactccctgcagataccagaatccccagatgcccaagtcacttatataaaatggcataatatttg

SEQ ID NO: 49186 - DNA, 201 bp, Homo sapiens
caccatgtagtctttgagggtagcctttgacaaagaagcaaaggaaggaacactgcatcgaaaaagtgtgtgatgcaatcccaggcaattacataattccrccaaaatgaattctctgcaattgcctcacaccctcagtttataaggcggacagtggtaatgggagaataggaaatttacgatagattagtgaattcccag

SEQ ID NO: 49187 - DNA, 201 bp, Homo sapiens
aaacctgtatccatttagctgctattgcctcctacatcttctctttatttgaacccttcccagtgtctcagtgcagcttcaccaaattcactggctgccayaggaacttcttcctatagaaccttgcatggtttatagaattttagtatctcagaattgagaggaaacatagagatcatgtagcacagcatatccacatat

SEQ ID NO: 49188 - DNA, 201 bp, Homo sapiens
tgaagcatcatgaaattcaaacaatcacttttagccaaataccatcgttgtatattaatcacacacacacacacacacacacacacacacacacacacacmgagagagagagggagaaagagagagagagttacagagttcaggttgctgaattataaaatgatctcttcttttctcctctgccatgcccatgatagccat

SEQ ID NO: 49189 - DNA, 201 bp, Homo sapiens
aactggtgatgaagcatcatgaaattcaaacaatcacttttagccaaataccatcgttgtatattaatcacacacacacacacacacacacacacacacasacacacacagagagagagagggagaaagagagagagagttacagagttcaggttgctgaattataaaatgatctcttcttttctcctctgccatgcccat

SEQ ID NO: 49190 - DNA, 201 bp, Homo sapiens
ctaactggtgatgaagcatcatgaaattcaaacaatcacttttagccaaataccatcgttgtatattaatcacacacacacacacacacacacacacacasacacacacacagagagagagagggagaaagagagagagagttacagagttcaggttgctgaattataaaatgatctcttcttttctcctctgccatgccc

SEQ ID NO: 49191 - DNA, 201 bp, Homo sapiens
atagccttagatttaaagaaagaatagtcacttcatttgtctataacccaacatttattgataaataatagtcttatattagagaattaatggggagaaargaataatgctaagaaaatatgtaactgcaataatttgtaaaaatacttttggggggaaattgtgaattaaaatttaaattcatttattcattcacttggc

SEQ ID NO: 49192 - DNA, 201 bp, Homo sapiens
taaaaatcacctctaaagctgtttgtgattgagcacttcaggatgtcaatcaactgtaagctgctgctattttacacctctacaatctctaactggtgatraagcatcatgaaattcaaacaatcacttttagccaaataccatcgttgtatattaatcacacacacacacacacacacacacacacacacacacacacag

SEQ ID NO: 49193 - DNA, 201 bp, Homo sapiens
gacatgggacatgacagcacatcagttcagacaaaaagttgaagaattcagaggagaagagttcaggctgtggtgatcagcagagtcttcagagactttaygagttaaatcctggaggattagtgggattttacgccataaaagtggaaaaattctcaggggaatgtgagccaagaaccagaagcaataacacacaaagtc

SEQ ID NO: 49194 - DNA, 201 bp, Homo sapiens
atgggacatgacagcacatcagttcagacaaaaagttgaagaattcagaggagaagagttcaggctgtggtgatcagcagagtcttcagagactttacgarttaaatcctggaggattagtgggattttacgccataaaagtggaaaaattctcaggggaatgtgagccaagaaccagaagcaataacacacaaagtcact

SEQ ID NO: 49195 - DNA, 201 bp, Homo sapiens
gggatcattcaaatggaagaaatagtttgagacagaaagcaatcattgcagtaaatttcaactttcacattgacctttagtcagagaacagtaccatttcycaataaggcagggttgggcaggcagttggcccatgtatatttggctttctgctgaatttcttatatttctgtaccatttcttgcttctttttaaaatagc

SEQ ID NO: 49196 - DNA, 201 bp, Homo sapiens
ctcacaacaggcatagcatcacttcctactccaggggtgcaatgtccagccctcaccactcctgggcagggaaccatgtactgtaggcatcatccgggaamctttggttttaataccacttgttactttggctgcaacgctggattcacactcataggagacagcactctcagctgcagaccttcaggacaatggacagca

SEQ ID NO: 49197 - DNA, 201 bp, Homo sapiens
gtgcaatgtccagccctcaccactcctgggcagggaaccatgtactgtaggcatcatccgggaacctttggttttaataccacttgttactttggctgcarcgctggattcacactcataggagacagcactctcagctgcagaccttcaggacaatggacagcagtaactccagcatgcagaggtaaggtgaaaaggagc

SEQ ID NO: 49198 - DNA, 201 bp, Homo sapiens
ataaccctgaagttccctgaaaatgtagtttaaggaggatgacagtctacttctttcaaacttccagtgtccagatatgctgaacacttattaagtatttyaataaacacatactgacatgccagttgatcacaaatgtagtaataacatttagactaacagtattttaagaaccaaaattttgtaaatagtatatttgga

SEQ ID NO: 49199 - DNA, 201 bp, Homo sapiens
acagagaggtacagtaacttgcccaagacaacacagctagtaagtgaaactgaaatctggacaactgatttttttcagccaagctcttcaagcccgctgcyatgctgcagcttagctggcgacaggcccttatcaaggcagaactgtgccttgatagaggccaggaaggcgattcagagcagtaggccttgtccatgtgtt

SEQ ID NO: 49200 - DNA, 201 bp, Homo sapiens
acttccagtgtccagatatgctgaacacttattaagtatttcaataaacacatactgacatgccagttgatcacaaatgtagtaataacatttagactaayagtattttaagaaccaaaattttgtaaatagtatatttggaggcaagatttatcaatgcattagcaggtatttgtcggatgctactatgtgtccatcttt

SEQ ID NO: 49201 - DNA, 201 bp, Homo sapiens
gcaagtactcaagctagccattgtgcctgtatgttgaagtctcacccaaccacaaccactactccaagtgtcatctcccttatgaaatccacaccaatccyattagaagtaatgtgtcacaggcatttcacttctgtccttcctcatgtcacaagctaaagctaatacacaagtactcagagacttaaaggaagaaacatt

SEQ ID NO: 49202 - DNA, 201 bp, Homo sapiens
agagctactgtgaatattggaagtggctcatatcctttctgaccttttacattctgcctcatttattggcaatgttaggttacaaaagaaactataatctstttcacctccaatccacatgttgtttctcttgcattatttcttttctgcagctgtgaaatgctcagaactacatgttaataagccaatagcgatgaactg

SEQ ID NO: 49203 - DNA, 201 bp, Homo sapiens
ttcatttttgtatcccccacaaaacatagcacagtgctttgcaaatgtcactactgataaataacatttatttgaattaaatctaatttcttgacctttamtttcctatccataaattagaaagaataaccctgaagttccctgaaaatgtagtttaaggaggatgacagtctacttctttcaaacttccagtgtccagat

SEQ ID NO: 49204 - DNA, 201 bp, Homo sapiens
ttttgtatcccccacaaaacatagcacagtgctttgcaaatgtcactactgataaataacatttatttgaattaaatctaatttcttgacctttaatttcytatccataaattagaaagaataaccctgaagttccctgaaaatgtagtttaaggaggatgacagtctacttctttcaaacttccagtgtccagatatgct

SEQ ID NO: 49205 - DNA, 201 bp, Homo sapiens
aggaattcaagaccagcctgggaaatatagagagaccctatctctagagatttttttttttaattagccagtagtgatggcacacatctatagtcccagcyactcaggaggctgaggtgggagaattgcttgagcccaggaggtcaaggctggagcaagcagtaatcatgccactgcactccagcctgggccgcagagtga

SEQ ID NO: 49206 - DNA, 201 bp, Homo sapiens
tctgttcatcatgtcctgggatatggtttaccttggctacttaaaggcatatgtaactgagaggaggtttaattcagataaaatactatccttgagttgcmaactattttttctaattgaaatgttaaaaataagacttctcagaaattaactaaatcatacagtctattcaatatttccagttagttattttttaaatgg

SEQ ID NO: 49207 - DNA, 201 bp, Homo sapiens
tttaaaaaaacctttaaaaatctcattcacattttaaatcatgtaggcaaccaacatggctgctaaatctgtaatctctaaagcccttgcttcccttcacyactttccagcccccctttctctgcaggaggaggcatttgcctcccactttgcaggccccatccccactcactgtcaagacccaaccctgaccatgaacag

SEQ ID NO: 49208 - DNA, 201 bp, Homo sapiens
taagtagctagcaaagttcatatagcttgaagtatggagacaggatgcaaacccaggcctagtctgattatagggctagtgttttgaccactgaactacaytatcacccagtggcagagcttctgaatctcaggtaagtcacttgtgaatttactcttttccactccacagattgcagctataactgctaaatgaacttta

SEQ ID NO: 49209 - DNA, 201 bp, Homo sapiens
actgggattacaggcgtgagccactgcgcctagcctctgtgtgttaagtgctggaactatagtttacagtagcattttatcctcccaacataccctatcasgaaaaattattattgtcatccttatttcacagatgtcaaaactgaacagagaggtacagtaacttgcccaagacaacacagctagtaagtgaaactgaaa

SEQ ID NO: 49210 - DNA, 201 bp, Homo sapiens
acaaatggatgaagtaaacttttcaaagtaaaacaataagaggtagatataggcttcaagtccagagatactgaattcacagcctgcaccctagccaccgygctgtatagaagtcatggcatatgtgggtgctgttatgtcttgattatggctgggccactgtccccacattaggaagcaaaacaaagccactctgatcaa

SEQ ID NO: 49211 - DNA, 201 bp, Homo sapiens
agagttagtaataatgagaccagtgataatggtaataattattgcttaatgtaggactacctatttcataagcatcatcacattcaatccacacaaatgayccttaagttggttattactatgcccattttaaaggtgaagaaactgaggctttgagaggttaagtagctagcaaagttcatatagcttgaagtatggaga

SEQ ID NO: 49212 - DNA, 201 bp, Homo sapiens
caccacaacgcccggctaattttttatatttttagtagagaagggtttcaccatgttggccaggctggtcttgaactcctgacctcaggtgattcacccgycttggcctcccaaagtactgggattacaggcgtgagccactgcgcctagcctctgtgtgttaagtgctggaactatagtttacagtagcattttatcctc

SEQ ID NO: 49213 - DNA, 201 bp, Homo sapiens
tgctattgttctaatgtattgttcagtgtagagttagtaataatgagaccagtgataatggtaataattattgcttaatgtaggactacctatttcataakcatcatcacattcaatccacacaaatgacccttaagttggttattactatgcccattttaaaggtgaagaaactgaggctttgagaggttaagtagctag

SEQ ID NO: 49214 - DNA, 201 bp, Homo sapiens
acatgcaatgcctgcctcctttttacaatgtcttttgcaatgtcttcttttctactctgaagtaaaatacacagataacaaatattctaattaaaatatamagtaggaataaaatgaaaagtaatttataataaaaacaagatgcaaaaacttaggcgctgtgccagtagatgcaatgaggtcatcagaagcgtgcacctt

SEQ ID NO: 49215 - DNA, 201 bp, Homo sapiens
ttttgtaaaagttcccctgggaattctgatggtctgccaactttgggagacactgataatattgtagataaagaagtgtaagcaactgttcagttagggakacaatagatacctgcatggaataacaaaaggtaattaacatgattatataatttgaatagtgttgtaatagttcataaaatggaaaagccaatttgagcc

SEQ ID NO: 49216 - DNA, 201 bp, Homo sapiens
actgagcattactaaatcccagccacagaccttatttagggatgggtgagatttaaccctagcataactatgtgtgcacttccctcctctctccacttctwtattgaatataagcttcttgaaggcaggagctgtgccttcttcatctttataccccctgcagcagctagacagaataaaaatgggtgtgtgtgacaaata

SEQ ID NO: 49217 - DNA, 201 bp, Homo sapiens
cattcattcttgtcttcttgctgattttagatgatgggaaatgccccttgaatcctcacaggtaaggtagaaatgttttatgattgagtaaattttgctaycttaactttataattcactgtaatatgtcagaatgattacatgcaatgcctgcctcctttttacaatgtcttttgcaatgtcttcttttctactctgaag

SEQ ID NO: 49218 - DNA, 201 bp, Homo sapiens
gcctcagcctcccgaatagctaggattacaggcaactttttgtatttttaatagagactagggtttcaccactttggccaggctggtctcaaactcccgamctcaagtgattcactcacatcagcctctcaaagtgctgggattataggtgtgagccattgtgctcagccggatttttggttcttaaatgctctgagtctg

SEQ ID NO: 49219 - DNA, 201 bp, Homo sapiens
ccaccaatgtgtgaaggtaggctgtgggtctgtcctttcttatggctttaaagatgacatcagagaatggagaatcatcagggatttatataaaagtgttyttgagctgaagcaaacaacactctccacaacaatggtaatctagataaaaaagttctccctctctttaaataatattttaatagctttagttaaatattc

SEQ ID NO: 49220 - DNA, 201 bp, Homo sapiens
acagttcattgctccatactgtcctgcctctgggtgtttcacagcaaggaggttgccactcaccacggcttcctgtgaccttccagttcccttctgctttyagttctttatttactctgaactttctcctcttgttgctgggtgcacatcaagtgaaatacccaaatgtgggctgggcaggaaggtaccatgcagagtgca

SEQ ID NO: 49221 - DNA, 201 bp, Homo sapiens
taccgtgccaacctgccaaggtacaattttcatgtgggttaagaagtcactttgatgtggaaaataacaaaatcagtgtttcttccctgtgtctttctcayagtggtcttgctttccatccccgggtttccccctgcttaataagtgtttcacaatgaatcaggcagaatctccttgccttataaagtagtggaaattaaa

SEQ ID NO: 49222 - DNA, 201 bp, Homo sapiens
attgaaggatagacgtatattttttatattccccaagctttttccccctcaatgtatccaattccttagttaacttttatagacaatgctgctttttaaaygcaagattttcatttataaaaatctgcagaaatataataaagaaatgaagaaatatcctcttaaatactcctatcctaaaatagacactgttaggcttct

SEQ ID NO: 49223 - DNA, 201 bp, Homo sapiens
acttgatatttaacaagccagtgtgctctgtcagtattgcaacatcttgtatgaacttgaacgggttctagtcatccatgtttgtgaattgaaggatagaygtatattttttatattccccaagctttttccccctcaatgtatccaattccttagttaacttttatagacaatgctgctttttaaacgcaagattttcat

SEQ ID NO: 49224 - DNA, 201 bp, Homo sapiens
ggcctcccacagtgctggtattacaggtgtgagccactgctcccggccttgtacttgatatttaacaagccagtgtgctctgtcagtattgcaacatcttktatgaacttgaacgggttctagtcatccatgtttgtgaattgaaggatagacgtatattttttatattccccaagctttttccccctcaatgtatccaat

SEQ ID NO: 49225 - DNA, 201 bp, Homo sapiens
ttacaggcgtgagccactgcgcctagcctctgtgtgttaagtgctggaactatagtttacagtagcattttatcctcccaacataccctatcaggaaaaaytattattgtcatccttatttcacagatgtcaaaactgaacagagaggtacagtaacttgcccaagacaacacagctagtaagtgaaactgaaatctggac

SEQ ID NO: 49226 - DNA, 201 bp, Homo sapiens
cccttcttcacctgcagtaaaacagtcactagtttggttgctctccctaatacctctggtcactgggagctgtgatctcaccaaacccctgccaggaaaarccccagaaaaagcggagggagtgagagccagaggctgctgctgccgtttgcaagaactgcaggggaggaggacgctgccacccacagcctctagagctca

SEQ ID NO: 49227 - DNA, 201 bp, Homo sapiens
tcagtttgctaagatcttatgtgctagctctttagttctgaagaaagctgattgtataatgaatttaggcagtgtgtgacttgttgacaaggacagttctrtttactggctttcctatattgcaggtggacatgcaaaaggaagtcataatcacagggatccagacccaaggtgccaaacactacctgaagtcctgctata

SEQ ID NO: 49228 - DNA, 201 bp, Homo sapiens
ggttttatttttattttcttatataaaaaagagaaaaaagcaaaaatgaaaagagggaaaggaaacatgtatgatatttttgaagcccaatgatgtcattsgaggtcactttgataattaggactgtgaagctgtattgtatgtgagttaatttgtaacattatatttagataagtgaaagtttcttctagtgaggtgtgg

SEQ ID NO: 49229 - DNA, 201 bp, Homo sapiens
aaaattaatgagacttactttattactaagtctttgaaattcaatgtatattttatactcacagcatatctcagtccagtctacccatatttcaagtgctygataaccacttgtagccagtggctaccatattgaacaatgcagttatagaccatttagaaaaacatctagaatgaggtataaactaataatacatcatgt

SEQ ID NO: 49230 - DNA, 201 bp, Homo sapiens
ctgataaaacaccttgaggtcatccttgacttctgtctctcacaagccacatgcaatccatcagcaagtcttgtttgccttacctacaaaaatgtccagamtccaaccactactcatcacgttctgctacatgtgctggcccagtacactgcagtctctttcctatactgcctaatctctctgcttccattcttgtcccta

SEQ ID NO: 49231 - DNA, 201 bp, Homo sapiens; identical to SEQ ID NO: 48894

SEQ ID NO: 49232 - DNA, 201 bp, Homo sapiens
gttccatcaggcactggtataaaaaattgtatccatattataatagttgttggtatgagaacattttaaaataatttcagacttttcatggttcacatttaaatatctttccttctacatgttccagccatcatacctttgagagaataattgagtaggagagtggtttatgtgcaggttttagaactagactaataagtg

SEQ ID NO: 49233 - DNA, 201 bp, Homo sapiens
agttccatcaggcactggtataaaaaattgtatccatattataatagttgttggtatgagaacattttaaaataatttcagacttttcatggttcacatttaaatatctttccttctacatgttccagccatcatacctttgagagaataattgagtaggagagtggtttatgtgcaggttttagaactagactaataagt

SEQ ID NO: 49234 - DNA, 201 bp, Homo sapiens
gagttccatcaggcactggtataaaaaattgtatccatattataatagttgttggtatgagaacattttaaaataatttcagacttttcatggttcacatttaaatatctttccttctacatgttccagccatcatacctttgagagaataattgagtaggagagtggtttatgtgcaggttttagaactagactaataag

SEQ ID NO: 49235 - DNA, 201 bp, Homo sapiens
agagttccatcaggcactggtataaaaaattgtatccatattataatagttgttggtatgagaacattttaaaataatttcagacttttcatggttcacatttaaatatctttccttctacatgttccagccatcatacctttgagagaataattgagtaggagagtggtttatgtgcaggttttagaactagactaataa

SEQ ID NO: 49236 - DNA, 201 bp, Homo sapiens
atatctattcattttcacccacaatctgggaaacagtcataaattatagtcaacagaatttaaatattaactgccagggggtaatgttaaataccagaatkgatagccagaggttttagaaatctcattctttcagtgttttttctgagcaatttatgtaaatctctattcaaatatgtaagctttatggaaaacttgaaa

SEQ ID NO: 49237 - DNA, 201 bp, Homo sapiens
ctccctctttctcagatataacagtttgtgcccatgaccacatcagctggcatctgctgggaatgagctcggggccagaattattctccattcatttcaayggccaggtcctggagcagaaccatcataaggtctcagccatcacccttgtcagtgctacatccactaccgcaaatatgactgtgggcccagagggaaagt

SEQ ID NO: 49238 - DNA, 201 bp, Homo sapiens
agattagtgcccttataaaagggaccctctcactcaccctctttctaccatgtgaggatacaaggagaagatggcagtctacaacctggaagagaccctgyaccagaacccaaccatgctggcaccctgattttaaacttccagcctccagaactgtgaggaagaagtgtccgttgtttataagccactcaatccagggta

SEQ ID NO: 49239 - DNA, 201 bp, Homo sapiens
gataaatatgctattttaaaaaataagaatttcttcaagttgaaatcattatggttgattgcttgccctaaactctttgctatccaggaaagctaatgagygtcttctatctgcagtgctactgaaaacatgtctttcctttcatagggaccctaactgagggtgggacacagaagacgtttgacaagcaaatcgtgctac

SEQ ID NO: 49240 - DNA, 201 bp, Homo sapiens
gcttgaacccaggaggcggaggttgcagtgggtcctgagattgcatcactgcactccagcctaggagacagagcgagactccatctcaaaaaaaaaaagaaaaatgctccagtgatgtcccatttcacttagaagaaaattcaagttcttaccgtagcccatagggcctcccttgttctacacacctaccatccacctcat

SEQ ID NO: 49241 - DNA, 201 bp, Homo sapiens
atcttaaaatgggaataataatacatacattgaaagatggtttaaggcgggggtcagtaaatttttccgtaaagggccagatagtaagtttgtttggcttygcaggccataagatctctgttgcaagtactcaactctgccttttagtacaaaagcagccatagacgatacctatttttttggctttggttacagatgcca

SEQ ID NO: 49242 - DNA, 201 bp, Homo sapiens
tgcttgaacccaggaggcggaggttgcagtgggtcctgagattgcatcactgcactccagcctaggagacagagcgagactccatctcaaaaaaaaaaagaaaaatgctccagtgatgtcccatttcacttagaagaaaattcaagttcttaccgtagcccatagggcctcccttgttctacacacctaccatccacctca

SEQ ID NO: 49243 - DNA, 201 bp, Homo sapiens; identical to SEQ ID NO: 48921

SEQ ID NO: 49244 - DNA, 201 bp, Homo sapiens
ttgcttgaacccaggaggcggaggttgcagtgggtcctgagattgcatcactgcactccagcctaggagacagagcgagactccatctcaaaaaaaaaaagaaaaatgctccagtgatgtcccatttcacttagaagaaaattcaagttcttaccgtagcccatagggcctcccttgttctacacacctaccatccacctc

SEQ ID NO: 49245 - DNA, 201 bp, Homo sapiens
gagtgcctattactagaatattaccaacttttagattggaaatattcaactctaagaactctgatgtgacaaaggcataatttgtagccataattgctttyattccggcccatggtctgattgcattgaaaacacatcagtcagatcaaaagcattcctgtcaattgggaaacctgtgtaaagcatccttcttcatgactt

SEQ ID NO: 49246 - DNA, 201 bp, Homo sapiens
catgaaaatctgatcgaggatttcaactcggggctgattgggcccctgcttatctgtaaaaaaggtaagaacacccccaccaaaagattcaacaactaaaygttggaatggtcaggagttctgtcatgggacaaagcttgggagcatcttggtaacttcttgtacatcaagcagaggaagacggcacggagaccagatcat

SEQ ID NO: 49247 - DNA, 201 bp, Homo sapiens; identical to SEQ ID NO: 48923

SEQ ID NO: 49248 - DNA, 201 bp, Homo sapiens
ttcatggtataaccttgtcactccatacttcattttacaatcttttaaaaaaatttgcactctctataatttgctcttagtctttgtgatataacaagggyctcaaagataaaatgctaatttttaatggtgtcatttcaaagttagaattcgggatcagaaatatgtgttttacttaacccccttccattcacatgaaat

SEQ ID NO: 49249 - DNA, 201 bp, Homo sapiens
aaactctcagtgtgatctagaccaagaatggttctgccaatcagagtgccgacagcatctctgtgaagaaagtgcctggattatatagacacatcacaacyctccaaggaagggctctaatttggaattacctccatcagcccattttcaataagacctacctgagattcaaactaggcctgactcttccaaagtcctcag

SEQ ID NO: 49250 - DNA, 201 bp, Homo sapiens
cacatacacctatatatacacatacacttatgtatgtgtgggtgatgttgaagaaacatatcaatattatttcctttagaattgaatgaggttatggtagrcgataaatctcccaaaggtaaaaatttatcttagatgactctaaaactcagtttagaccttctgatctttctccaaacacatatcaccaaccatgtgatt

SEQ ID NO: 49251 - DNA, 201 bp, Homo sapiens
ccatttccaaaactctcctcagtcatcttttctgggtttgaccacacatgtagtatttcagccagattcacagggtcttatcagccaggcattatagtccycattaatatggccctttgcctgtggcaaccattcatctattcagaaaactttgttgaacctccactatatgtgaggaactcctccaaagttttcccacac

SEQ ID NO: 49252 - DNA, 201 bp, Homo sapiens; identical to SEQ ID NO: 8624

SEQ ID NO: 49253 - DNA, 201 bp, Homo sapiens; identical to SEQ ID NO: 48953

SEQ ID NO: 49254 - DNA, 201 bp, Homo sapiens
gtagaatttttagttcttttcagtgacttaggctcctaggaaaacctttgtgaaacagaggttctactcaggtaaactctcagtgtgatctagaccaagartggttctgccaatcagagtgccgacagcatctctgtgaagaaagtgcctggattatatagacacatcacaactctccaaggaagggctctaatttggaat

SEQ ID NO: 49255 - DNA, 201 bp, Homo sapiens
gaccatggcttcttcaaggacaagccctagcaggaaggatcagcaggaagattgcagtaaagatgaacagattaggagtaatcctcaacacacaaaaaaamccagcatttcaaaaggtgacagaagagtaatattcagtggcatctagaatattttctctttccatttgcatttgggcacttatgagaaggcaaaatcata

SEQ ID NO: 49256 - DNA, 201 bp, Homo sapiens
tgtatttatttacagcttactcagtaatacaaaggatctgagacagtttctcaagttataaaggcataaaacaaggagtctatgtaattgggatagaataygcggacaaagaaaataaagccacagataagtagataccatgtgaccctgtaaggctgtcttcaaattttgtcctaagctttatggcagtcagtgtaaaaa

SEQ ID NO: 49257 - DNA, 201 bp, Homo sapiens
ttaattgcaacatgactgggaaagaaaatacttaaccaaaatgtgaacatgtattcccacaggctatcagagcatttgttaggagccagaaattttacaamtattttccagtcttcataacccatcaaaaaggataaagttatctctagaaaaaggattatattatcttaaattataaatgaaaaaactgaggttaaaggg

SEQ ID NO: 49258 - DNA, 201 bp, Homo sapiens
cgttgtttataagccactcaatccagggtactttgttaacagcaacccaaactaagaaaatcaccaatttctatcttactcacatgtgttaccagaactcragcacacttaagatctatcttatctaaagtagaacataaaggaaagaggctgtattaattgcaacatgactgggaaagaaaatacttaaccaaaatgtga

SEQ ID NO: 49259 - DNA, 201 bp, Homo sapiens
ccctatcaagaaggaaatattttctctttttttttttaaacaggaaatagaagagacaaattagaagctagagaagaaatgtgcagccttgttaggtataktgacctgagtaggtttcaccttggcctgtactttgaataagaccttaaggtatcagctcagccactctctccgagttctgcagttcctctatatgatgac

SEQ ID NO: 49260 - DNA, 201 bp, Homo sapiens
gaatcacttgaacccaggaggtggaggctgcagtgagctgacatcgcatcacttcactccaacctgggtgacagagcgaaactctatctcaaaaaaaaaamaacaacaacaacaacaacaaaaaagtatattgagaacctactacattctaggctctgggataaagtgaataagacatggaccttgatttccaggagccaa

SEQ ID NO: 49261 - DNA, 201 bp, Homo sapiens
caaattctgactcagccatcaactttttccctaactccccagacagaatttgtgcttcatcctctcttcttctgtaatattttgcccatatctcagcagtygctcctatcatacatctatctccaaactagcttgtgagttccttcagtacagggactgtatttgatccaggtagccagaaactttctaacacagtgcctg

SEQ ID NO: 49262 - DNA, 201 bp, Homo sapiens
ccaaagctcttttgtaatctttcacagataatgcttcctgcttattagtggagactttctccataaactttttttcttttatagactagaattatgttatmacttacaggaagtgacttaagcttttatcatttctcagctcttgacagttttattatcaaagtgaaagtacagcctagagtaaatattagttattagtgt

SEQ ID NO: 49263 - DNA, 201 bp, Homo sapiens
atcccattatgctgatgttcagatcattgtaagcatagtagagttccatcaggcactggtataaaaaattgtatccatattataatagttgttggtatgakaacattttaaaataatttcagacttttcatggttcacatttaaatatctttccttctacatgttccagccatcatacctttgagagaataattgagtagg

SEQ ID NO: 49264 - DNA, 201 bp, Homo sapiens
tgatcccttttatgtgctctcagcaagtgtagacataccttattaaaagttcaggatctggctatttgtctgtgcctctcaagcaagtagcttttcccccycaccaagggtcttactctgtcacccaggctggagtgcagtggtgtgatcatggctcactgcaacctccacttcctgggctcaggcgattctcgcacctca

SEQ ID NO: 49265 - DNA, 201 bp, Homo sapiens
gatggcaataatcataaagataatagtcatgcaagttattgtatcagccgctgaatagtaagtacctgatgttaatatggttctaattatcccattatgcygatgttcagatcattgtaagcatagtagagttccatcaggcactggtataaaaaattgtatccatattataatagttgttggtatgagaacattttaaaa

SEQ ID NO: 49266 - DNA, 201 bp, Homo sapiens
aaacagtacaggaaagccttattatgattatcatcaccactgcaaacaaatgctggctgaactccatgagtgccgtgacttccttctcctgcttctaggaygcctaatggcgagaagccaatcccatgacacttgtggatggctcagaaatgacagtagttgatttctgtcacttgtctggaatggggcttttggtcatag

SEQ ID NO: 49267 - DNA, 201 bp, Homo sapiens; identical to SEQ ID NO: 48991

SEQ ID NO: 49268 - DNA, 201 bp, Homo sapiens; identical to SEQ ID NO: 48992

SEQ ID NO: 49269 - DNA, 201 bp, Homo sapiens; identical to SEQ ID NO: 8582

SEQ ID NO: 49270 - DNA, 201 bp, Homo sapiens
atatttaagtcagggccacacaaggtaggtaaaaatatctaattattgagtcagaaacataatccctaaccatggagttttactttattgtatatattttrtaagcaaaaattattcattttttttctgtttttcatagactgtaggatgccaatgggactaagcactggtatcatatctgattcacagatcaaggcttca

SEQ ID NO: 49271 - DNA, 201 bp, Homo sapiens
accactcgccctctctgtgtcaacagatttttaattgatttcaactctttgtcctttcagccattaatgggatgatctacagcttgcctggcctgaaaatrtatgagcaagagtgggtgaggttacacctgctgaacataggcggctcccaagacattcacgtggttcactttcacggccagaccttgctggaaaatggca

SEQ ID NO: 49272 - DNA, 201 bp, Homo sapiens
tgtgctgaaagaccttttttcccctctaatctccactaagcaacacttttgttttttattctgttaagcgagatgaacgcactggtcatgtgcttagagtyacagcaatgtcaaattgctttagaaaaacaaaagtttactaaatatttcattctcatttttctctccttgtgttattttgacccagtaatcaataggtca

SEQ ID NO: 49273 - DNA, 201 bp, Homo sapiens
gtgttgaatggatcatacatggcatatactgaggggtgagctccaaagaacactggggaattcaggtgggaaaataaatcaacccacgttatgtggtatcrtgtaaacaaaataactgattgttctactacacatttttgctttaaaactgttgagattagagttcatataaatggagactaaaatctaaggaaatgatat

SEQ ID NO: 49274 - DNA, 201 bp, Homo sapiens
acccactaactcgtcatctagcattaggtatatctcccaatgctatccctcccccctcctttgggagatttttaggtaatgaggatggagccctcatgatragattagtgcccttataaaagggaccctctcactcaccctctttctaccatgtgaggatacaaggagaagatggcagtctacaacctggaagagaccctg

SEQ ID NO: 49275 - DNA, 201 bp, Homo sapiens
acttacagtgcttgaatgtattaagggaaacagtacaggaaagccttattatgattatcatcaccactgcaaacaaatgctggctgaactccatgagtgcygtgacttccttctcctgcttctaggacgcctaatggcgagaagccaatcccatgacacttgtggatggctcagaaatgacagtagttgatttctgtcact

SEQ ID NO: 49276 - DNA, 201 bp, Homo sapiens
attaatctgatgcctgacatctccacattagaactctgtttaaaacaccttttcctatgacttcctatttaaatgttgcactcaataccacatgagaacaactagctacctgagtatttctaagcaaggccccgagggagtgagatgcagggcctgtccagagtgaatagggatggaaccaccttcaaaatcttgtattcc

SEQ ID NO: 49277 - DNA, 201 bp, Homo sapiens
atagttaaagtcctgaatcttgggaaacccctcagaccagaacagtcggttaccttcttggttcccttcttggcctaatcctttagcaatccctgtgtttytgagttcacatccaccatctctaagctctgttgttacctgtataatgccatttatcacaatgagttgtcactgcttgtttgctggtcactcagatgtctg

SEQ ID NO: 49278 - DNA, 201 bp, Homo sapiens
acaaataagattgaataaaaaagcaatgctaaactgtatgcagaatttaagaaatccactttaatgagagagacaaagataggtaaaaaataaaggatagraaattatataccataccagctaacactaatccaacacaaaagggtgtgtaatgatgattccattgatatgacattacagaaaagccaaattatagtgaaa

SEQ ID NO: 49279 - DNA, 201 bp, Homo sapiens
gaacagagcatcagtgaactgtgggaccatatcaagtgatctaacatatgtgtaattggatcccagaagtagcaggaacagaaaaagtatttgaagaaatratgactgaaaaattcccaaatgtaatgtaaactacaaaccaacagattcaagatgtttgacaaaactaagaagaaggaacatgaagaaaaccacaccaag

SEQ ID NO: 49280 - DNA, 201 bp, Homo sapiens
tcatctcaagattcttaatcatagatacacagtcccttttgccatataaagtagcatatttccaggtcccagagattaggacgtggacatctcagcagggrcacattattctgcctactacacccaccaaacaaagccctcccacggtgtcctccatctcagagaatggcaccctcctccacccagctccccaaatcagaa

SEQ ID NO: 49281 - DNA, 201 bp, Homo sapiens
tcctaactcagattctcctgcatccctctgataaggacctttgttattacatgggatccacctggacagcccagaagaatctcatctcaagattcttaatmatagatacacagtcccttttgccatataaagtagcatatttccaggtcccagagattaggacgtggacatctcagcaggggcacattattctgcctacta

SEQ ID NO: 49282 - DNA, 201 bp, Homo sapiens
agaccacagagaaatcaaattagaactgaggactaagaaactcactcgaaaccacacaactacatggaaactgaacaacctgctcctgaatgactactggrtaaataatgaaattaaggcagaaataaataagttccttaaaaccaatgagaacaaagagacaacataccagaatctctaggagacagggctttgcttttg

SEQ ID NO: 49283 - DNA, 201 bp, Homo sapiens
aaacacagatataattgttggttcaaattattcttccccaagtaatattagtaagttcactgtcaataaccttgcagaacctcagaaagccccttctcacyaacaagccaccacagctggttccccactgagacacctcattggcaagaactcagttctcaattcttccacagcagagcattccagcccatattctgaaga

SEQ ID NO: 49284 - DNA, 201 bp, Homo sapiens
attagacatgagatgcttctgagacacccagagctacaactaaaaccggttccttaacattccagagggctgatgtaatctggcaggtgacactgtgggtraggcaaaaagagaaagtctgaaagatagcacagagaagctgctgcaaaacaaaccaacagaaaaccacaacaacaaaaagccagtgtgcttcagctggta

SEQ ID NO: 49285 - DNA, 201 bp, Homo sapiens
cttaaggttctcccaggcaaattcctgtttgagagtatgttctgatgtcatgcttgtatgatctgtaacatttacctcaaggccaaagtcttttagaaagyatacagtagcctatactctgctgaaagagctcttggaaagaactttggctaacatgtttgacatatctgaggtttgggctggtaatttgctctataaaca

SEQ ID NO: 49286 - DNA, 201 bp, Homo sapiens
tccacctgcttcagcctcccaaagtgctggggttacaggtttgagccactgaacctagctgagaagatgacttcaaagacagtgtcctaaaaaatctaccrggcaggggaaggggatcatggtctagagatgagaagcagattcaaaatgagatgtggcccaagctgaaaagagaagggcaggggaaggaggacttgcttg

SEQ ID NO: 49287 - DNA, 201 bp, Homo sapiens
ctgcccacatgtcttgatggctgttactcctccaggtgcttcttaccttgaccacacattccctgcggagaagatggacgacgctgtggctccaggccgakaatacacctatgaatggagtatcagtgaggacagtggacccacccatgatgaccctccatgcctcacacacatctattactcccatgaaaatctgatcga

SEQ ID NO: 49288 - DNA, 201 bp, Homo sapiens
aaaccatatttcaaaacactaaacttcttagaggttattctctaatgccatctgaaaatcacaaatagcttcacttactaaaacacaaatattgttaagakttgagatctgggtagtgtttttaaattgtattctatttcatttgactacattttccacttggttttctgaaaatatactcatatgactctcaatgttgat

SEQ ID NO: 49289 - DNA, 201 bp, Homo sapiens
gcagaggaaactgttcattccacttggctctctatggcactcacctctccccttcctgacctcacttgctccattttattattgaaaacctcacccaaccytctacacttcttttaatattgagtatctcagttccttctcttcaataaagaagaccaatttcttcatcctctccctctcctatcagtagggaaagtccaa

SEQ ID NO: 49290 - DNA, 201 bp, Homo sapiens
tagcagtagtctaaaacatctcccaaataaaacacagatcttgtatcggcaggaccactccttgaaacagttccataagtcattgcgtttttttctttccrtatggtataaatagatttgttcagatcctaataaactaccctaaaatgtgacattcaattctgctaacttatttaaaacatctattttttatacaagaag

SEQ ID NO: 49291 - DNA, 201 bp, Homo sapiens
ctattgtagtttgttttgttctttatttcagtgtacctgaagtaaatagtagtgttaatgctagtaagcctctgaggcagtgtgattctcagactttttgkggggccatgcctgaggaatgacattctccttctggttcttccaggggctcagccataagccctaactcttctcctcctctctattcccttccccaaagaa

SEQ ID NO: 49292 - DNA, 201 bp, Homo sapiens
gttagttcttgtaattgtagggggctgggctgtaggattggaggtatgaagatgcccatccaataaggtttgtggacatttgggcaggtgagggagtacasctggggtcatttttaggaattctgtcttgggctttaaaatggctagtcttggctgggcatagtggctcatgactgtaatcccagcactttgggaggccaa

SEQ ID NO: 49293 - DNA, 201 bp, Homo sapiens
ggaaaaaccgatagctgggggtcattgatttctctacataaaaagcccagcctctctgcagggatttggcaaggatcagataccttagtcttatgaccacrcgcccatttccaaaactctcctcagtcatcttttctgggtttgaccacacatgtagtatttcagccagattcacagggtcttatcagccaggcattatag

SEQ ID NO: 49294 - DNA, 201 bp, Homo sapiens
taaataaccctagaaccattattacttgataaatatgctattttaaaaaataagaatttcttcaagttgaaatcattatggttgattgcttgccctaaacwctttgctatccaggaaagctaatgagcgtcttctatctgcagtgctactgaaaacatgtctttcctttcatagggaccctaactgagggtgggacacaga

SEQ ID NO: 49295 - DNA, 201 bp, Homo sapiens
gacaataactgtactgtgtatcaagctctacttatggttttatcaggtctctcaaatgttacatttatttgaaatattagaagaaattgaactatttctgmtctttgacattaacagggggaaagagaagttgtgttttgtaaaacaggtgaaatagagagagaatgctatccaattatttcccagataaccctgcagcaa

SEQ ID NO: 49296 - DNA, 201 bp, Homo sapiens
atatttgactcatttttattaattctttaaatgacctgagatatcagaatggcatgaataacttgatgatcccttcagccaactaaatccaaattccctamtttctatcctcatatctccctcccttaagatacctacactccaatttcctggctttctatagaattccagggcctatccttaaattaggccactagaaag

SEQ ID NO: 49297 - DNA, 201 bp, Homo sapiens
cttctcttgagttatttcattgtctttctgtcctaactcagctgggatgcaggcttacattgacattaaaaactgcccaaagaaaaccaggaatcttaagwaaataactcgtgagcagaggcggcacatgaagaggtgggaatacttcattgctgcagaggaagtcatttgggactatgcacctgtaataccagcgaatat

SEQ ID NO: 49298 - DNA, 201 bp, Homo sapiens
gagaaaagacgtatgataagactgaagagagaagtagaggtaaatcatacatggacttgtggtccacgttaaggactttatgcaagaagtaaatctagatrtacctactcaacttatggtttccatgctcagaacctcatgagatacattgcacgttactgtagtacctgaatccttcattgctattgaatggatgtgcct

SEQ ID NO: 49299 - DNA, 201 bp, Homo sapiens
ttaatgtaggtgattacattttttcacttctcatctgaatattttggccttatgtagagacttccttgagtatatgataaacacctgaaacaaactataayggctatagtttgtatatttaataaatcacaaaaatgtggatcccttttccaaagagacttgcaagtcctgtgcaatgaaatcagctctttataaaacgtc

SEQ ID NO: 49300 - DNA, 201 bp, Homo sapiens
ctctgggtgaggtagtgggaacaggagtttctcctatgttcttaaaatcatacagtgacatagtgaacaaccacttcacctacttatgaggcttctagacractgcatcagaagttcagcaatgtaaagaagaagggggagaaacctcaaaatatcaaaatgtcacatgcaggtttcatttcaaataagggaggaggtaag

SEQ ID NO: 49301 - DNA, 201 bp, Homo sapiens
accccacaaaactttaaaaaatcattttatcatcaaacaaaatacccagatttctcagactggccaatggtatacggcagagtagaacatctggtcttgcrcctcaaggagctcatgctaaaaattggctaccaagacttttgattttactattgtagtttgttttgttctttatttcagtgtacctgaagtaaatagtag

SEQ ID NO: 49302 - DNA, 201 bp, Homo sapiens
agagtcttttccaggaaaaaccgatagctgggggtcattgatttctctacataaaaagcccagcctctctgcagggatttggcaaggatcagataccttastcttatgaccacgcgcccatttccaaaactctcctcagtcatcttttctgggtttgaccacacatgtagtatttcagccagattcacagggtcttatcag

SEQ ID NO: 49303 - DNA, 201 bp, Homo sapiens
tgtgaatggtaccccctacagttgtgcagcatgcagcctatgaaaccatacatgacaatcctatctatgaatcagtttttctctttatgcttttctctackacaatgtagtgaagcagctccatttggggtacatatatggtaaaggaaggaacactatggtaggagctaaaggcctgttagtgtgctcttaacactgcca

SEQ ID NO: 49304 - DNA, 201 bp, Homo sapiens
agcctgagaaccctagttatctaatctgagaagtgggcagaggagttgtcataccaataagagaataaacatgacttgctatggttgctggatacaccaaygataaactcctaattttataaactcctagacttcctaatttgcctgaaactttctctgaatttagaaggccttaaggtgacatgctgcatatctccttgc

SEQ ID NO: 49305 - DNA, 201 bp, Homo sapiens
ttcacaaggaaaatttgccctgtaagctagtaactgaaacagaaactgagaagagaaaggtacgagcttgtgttatgaatatgtagataggtgttctcacrcctgatataatttgaaggatgcccaaatgatctcaacccgtccctctccaaaaattcacctgcctggtttctgaaatttcacagcagttcctctaactta

SEQ ID NO: 49306 - DNA, 201 bp, Homo sapiens
ctcttagcctggtatcagaagttaaaaatgagataacagtacatagtgcatggtaagcacttggtaaatatttgttcaatgaatgaatttatatttaccakataagatagttgtcaggattaaatgggagattgcaggcaaatcatttaatatagtaatagattctcaataaatagtatcccttatattatcaatttatta

SEQ ID NO: 49307 - DNA, 201 bp, Homo sapiens
gggctgggaggagcttcatgggtctgactgctggggtgtgaagacttctcatatggcatttaagtcctttaccatctggccccaacctgctccttttctascctcatttctcaccaggttccacctgtccctgtgcatttcacagcccagttccaccgagatccttgctattccccaaactcttcctttactcccctgctc

SEQ ID NO: 49308 - DNA, 201 bp, Homo sapiens
tccatatgaattttagaatagctttgtctaatcctgaggaaaatgattccagtagttgttaaaaaatagtgttgaatctgtagattgctttgggcacaatrgctattttaacaatactgattcttccaatacataagcatagaatgtttttccatttgtttgtgtcatctatgatttctttcatcagtgttttgtaattct

SEQ ID NO: 49309 - DNA, 201 bp, Homo sapiens
acgataatttaacacaatatttaaaaaacttattctaagtaactcaggaatcaaaaaccagacactgtatgttctcacttacaaatgggagataaactgcrggtatgcgaaggcagacagattggtataatggacattggagactcaaaagggaacgggggatggatgaaaagctacctattgggtacagggtacactact

SEQ ID NO: 49310 - DNA, 201 bp, Homo sapiens
cacaattcttctttatattttctttcataccctgtgtaggtactcaagtcttttctatgttagctgctatttctcaggggctgtaatgtgacctgtggtayaaataaatccaggtaatcataaatggtcataataaaattctactatatatagcaaggatgtttaagagtcttaactgttcttcttggactcttaaagcag

SEQ ID NO: 49311 - DNA, 201 bp, Homo sapiens
aaatatcctgggattattcagaatttgtacaaaggtttggccagttttctccttttttattctcatttttccattactgctgaaaaaagtagctactacarttcagggggataattgtgggcaaattatactaagaacagtgtggttcccctattgcaagttggcctgttctttttcctttgtcaattccaagattgcttc

SEQ ID NO: 49312 - DNA, 201 bp, Homo sapiens; identical to SEQ ID NO: 8607

SEQ ID NO: 49313 - DNA, 201 bp, Homo sapiens
ctgtccagtggcacttctgtagtgtggggacccagaatgaaattttgaccatccacttcactgggcactcattcatctatggaaagaggcatgaggacacyttgaccctcttccccatgcgtggagaatctgtgacggtcacaatggataatgttggtgagtaagagtctggacactcacagaggaagcttgctttgaatt

SEQ ID NO: 49314 - DNA, 201 bp, Homo sapiens
atgaaaagaagagctggtactatgaaaagaagtcccgaagttcttggagactcacatcctcagaaatgaaaaaatcccatgagtttcacggtattttcctyggactttgatctaatctcctaattaaatcacactgggtcacagtgatttctgcccttagatattcacaagattagacatgagatgcttctgagacaccca

SEQ ID NO: 49315 - DNA, 201 bp, Homo sapiens
agtcacagcaatgtcaaattgctttagaaaaacaaaagtttactaaatatttcattctcatttttctctccttgtgttattttgacccagtaatcaatagktcacagacaagcagtggtccacagcccatacttgaatattcctgacgaaagtttattagaaattacctgccacaatggattattgtgttttcatgtcttt

SEQ ID NO: 49316 - DNA, 201 bp, Homo sapiens
tgattatcagaagagcaaggaaattcctgagaaagaggcaatacaatttactctgtttttccaggaaaaagatattcactcaggcttgataggtcccctcstaatctgccaaaaaggaatactacataaggacagcaacatgcctatggacatgagagaatttgtcttactatttatgacctttgatgaaaagaagagctg

SEQ ID NO: 49317 - DNA, 201 bp, Homo sapiens
agatgaacgcactggtcatgtgcttagagtcacagcaatgtcaaattgctttagaaaaacaaaagtttactaaatatttcattctcatttttctctccttrtgttattttgacccagtaatcaataggtcacagacaagcagtggtccacagcccatacttgaatattcctgacgaaagtttattagaaattacctgccac

SEQ ID NO: 49318 - DNA, 201 bp, Homo sapiens
cacaatatttacttgttaatttttgcaaatgtaatgttgttctttttattttaggttcatttaaaactcttgaaatgaaggcatcaaaacctggctggtgrctcctaaacacagaggttggagaaaaccagagagcagggatgcaaacgccatttcttatcatggacagaggtatcacaagagccatgtgatatttggttt

SEQ ID NO: 49319 - DNA, 201 bp, Homo sapiens; identical to SEQ ID NO: 49063

SEQ ID NO: 49320 - DNA, 201 bp, Homo sapiens
ttgtatgtgagttaatttgtaacattatatttagataagtgaaagtttcttctagtgaggtgtggtggtgatttaaaattttttttagttatctctgtgtrtgtgttgttattgttttgtttttatctgttatactttcagtcctacctaaagaaaaatggttaaattctatttgaaagcctcttgtgaagcaggaatttt

SEQ ID NO: 49321 - DNA, 201 bp, Homo sapiens
gatcattccttttcctaggttcgttttaaaaatttagcatccagaccgtattctctacatgcccatggactttcctatgaaaaatcatcagagggaaagasttatgaagatgactctcctgaatggtttaaggaagataatgctgttcagccaaatagcagttatacctacgtatggcatgccactgagcgatcagggcca

SEQ ID NO: 49322 - DNA, 201 bp, Homo sapiens
caatgtatggtgtgacttatgcatatgagttcattaatctgatgcctgacatctccacattagaactctgtttaaaacaccttttcctatgacttcctatwtaaatgttgcactcaataccacatgagaacaactagctacctgagtatttctaagcaaggccccgagggagtgagatgcagggcctgtccagagtgaata

SEQ ID NO: 49323 - DNA, 201 bp, Homo sapiens; identical to SEQ ID NO: 49064

SEQ ID NO: 49324 - DNA, 201 bp, Homo sapiens
tggccacccaaagtttcctagagttagacataaatctctacaagtaagacaggatggaggaaagagtagactgaagaaaagccagtttctcattaagacaygaaaaaagaaaaaagagaagcacacacaccatgctcctttatctccgaggacctttcaccctctaagaagtgaagcctacaacacattttcagaaagaag

SEQ ID NO: 49325 - DNA, 201 bp, Homo sapiens
aaaactacttgggccatatctcacaggatggttatgaaaattaaatgaaataatatacataagttattttgtaccttatatcttagctccgattttataaycagccattttgacttataatgctgacatttttgtggtttagatttttgttaagcttaagtacatttgtggatcattccttttcctaggttcgttttaaaa

SEQ ID NO: 49326 - DNA, 201 bp, Homo sapiens
ttagatttttgttaagcttaagtacatttgtggatcattccttttcctaggttcgttttaaaaatttagcatccagaccgtattctctacatgcccatggrctttcctatgaaaaatcatcagagggaaagacttatgaagatgactctcctgaatggtttaaggaagataatgctgttcagccaaatagcagttatacct

SEQ ID NO: 49327 - DNA, 201 bp, Homo sapiens; identical to SEQ ID NO: 8622

SEQ ID NO: 49328 - DNA, 201 bp, Homo sapiens; identical to SEQ ID NO: 49065

SEQ ID NO: 49329 - DNA, 201 bp, Homo sapiens
agacaattctccttaaatgtcatgtcacttcaccaagatagataagaattggacagcagagaattaaaggttgcaatctttgacaaaatcctagagtgtarttaatctacagacaaaggatgatccaaaggctttgacaatcaaccaaatagaagataggattaaggttctcttttgcagattaaagagcctaactaggac

SEQ ID NO: 49330 - DNA, 201 bp, Homo sapiens
ttctattttgccttctattaaaagtaatggcaaaaaccgcaattatagtttgcaccaacctaacacatgctgcctgaggagttagtgaaggcagcccctcracagcactttgggtgacgttgtgtgaatctgcctcagatgcagacacagaagtccaaatggactggtttgattaagagcagggaaaaaaagagggttctt

SEQ ID NO: 49331 - DNA, 201 bp, Homo sapiens; identical to SEQ ID NO: 8568

SEQ ID NO: 49332 - DNA, 201 bp, Homo sapiens; identical to SEQ ID NO: 49066

SEQ ID NO: 49333 - DNA, 201 bp, Homo sapiens
ctgccaagtgggggtcaaagtccaggttccccactccattgccacctaagaagggattgttccttggtggctgggtgggaagggaagttccccatttggcmtccactgatactgcaggggcaggagcttcattaggggctggagatgaaagccctaaatccctacatggccttttctgacacaaccccagtgagggtgtag

SEQ ID NO: 49334 - DNA, 201 bp, Homo sapiens
cattaatgggatgatctacagcttgcctggcctgaaaatgtatgagcaagagtgggtgaggttacacctgctgaacataggcggctcccaagacattcacrtggttcactttcacggccagaccttgctggaaaatggcaataaacagcaccagttaggggtctggccccttctgcctggtaaagattgggtaatgggaag

SEQ ID NO: 49335 - DNA, 201 bp, Homo sapiens
cagagttactttgaccattaaaatagtaatatgcgccaagtgcctagcactcagtagacaccaacaatggtaactattggagactcaccaagaaatctttratgttccagcaatgcatgccatttcagagattcaaaattgtcctcgtgaattattacttagaaacatctaaatgtctcttatttgtggggatagagctca

SEQ ID NO: 49336 - DNA, 201 bp, Homo sapiens
ttctgagtaatttagtttgatcaattagacagacattaatttgtgtgactagagtaacctttcattatctatctcaaaatatcatgtacacaagtatatayaataattttttaagcccagtatgtgttaaaataaatctaggtgtgaaacattgattgtttacagataggttcaatattgttagaaaatcagtcaccctgc

SEQ ID NO: 49337 - DNA, 201 bp, Homo sapiens
tacacaagttacttggccacactgagccacaagtcatttatctggaaaacagtgtaatcacatctcacagagttactttgaccattaaaatagtaatatgygccaagtgcctagcactcagtagacaccaacaatggtaactattggagactcaccaagaaatctttgatgttccagcaatgcatgccatttcagagattc

SEQ ID NO: 49338 - DNA, 201 bp, Homo sapiens
taacggctatagtttgtatatttaataaatcacaaaaatgtggatcccttttccaaagagacttgcaagtcctgtgcaatgaaatcagctctttataaaaygtcagcattgattcgcccattgcctacattatagcttctaaaagaatattctgaatctttgaatgtagtgaagcattcactaagtttattaacttaggag

SEQ ID NO: 49339 - DNA, 201 bp, Homo sapiens
agtcacttaagtgatttaagtaggtatttaaatatttgttaatgccagtcattatactggtactaaggctaagagtggtaatcgaggtagacatgagcccygcccttgtagaaatcatacctttggttttttactatgcttagtacataagtaaataaaaatattgcctacagcagtgtcccttttaacaataatgaaatg

SEQ ID NO: 49340 - DNA, 201 bp, Homo sapiens
ttgaggaaaaacaatgaagcattaactgtggcactgagatttcttccaaagtgaatttggcaagactctgggtgaggtagtgggaacaggagtttctcctwtgttcttaaaatcatacagtgacatagtgaacaaccacttcacctacttatgaggcttctagacgactgcatcagaagttcagcaatgtaaagaagaagg

SEQ ID NO: 49341 - DNA, 201 bp, Homo sapiens
catcatgtaaattattaaagtcacttaagtgatttaagtaggtatttaaatatttgttaatgccagtcattatactggtactaaggctaagagtggtaatsgaggtagacatgagccctgcccttgtagaaatcatacctttggttttttactatgcttagtacataagtaaataaaaatattgcctacagcagtgtccct

SEQ ID NO: 49342 - DNA, 201 bp, Homo sapiens
agagaagccaccatgattcacaatggagaaagtagctgaaacctggaatcagtttcctgttgaagcagataatggcacagtatacccttggatggatatgrgtattttgccaatgtccagatagcagtagtctaaaacatctcccaaataaaacacagatcttgtatcggcaggaccactccttgaaacagttccataagt

SEQ ID NO: 49343 - DNA, 201 bp, Homo sapiens
ccaaagatggattgacacatcaaagtagagcaaaatgagtatagggacccaagagtcttggaaaggcatgcatgaagacatttcaagtgatcagtaagatkttcagaacaaaaggaattccctgaatgagggttccggcatttgctgcagttctaaagttcagtggccaaaagcactgccatggcagtctgagagaaatgt

SEQ ID NO: 49344 - DNA, 201 bp, Homo sapiens
acttttattttagattcagggggcatatgtgcagttttgttatctgggtatattatgtgatgctgttgtttagggtatgattgatcccatcatccaagtarcgtgcatagtacccaatagtttttcatcccttgctcatctccttccttcccccttctagaagtccccagtgtttattgccatctttatgttcatgagtac

SEQ ID NO: 49345 - DNA, 201 bp, Homo sapiens
tcatagcaacatttttaagcaagaggtcaaaggctcacatccttagaaatgcgtttgatcttctattccaagcgtgtgtgtgtgtgtgtgtgtgtgtgtgkacacagacatactctgcgtggtgaggaaaagggtgagagagtaggactaatggaaggtgttatagtccatgtcaatagtatcctagactgagttcagggt

SEQ ID NO: 49346 - DNA, 201 bp, Homo sapiens
caatgactaatatatcaaaaagatgaatttcttatattatgcttttcctccaagtggaattattagaatatctttaaaggcagagaatggagcacaaaatmtttactatacatttgacgaatgactaaatcaatgtaaatggaaggctttatctttttcctgagatttctcctttggctaatttaggagaataatctctca

SEQ ID NO: 49347 - DNA, 201 bp, Homo sapiens
aaaaagaaagcaccatttatcctgatgttaagatctaagaggaacttctttaatgagttctacaaaagagagtgctgagtgatacagtagatggcatcctkgataaaattcttataaccagcataatagattaaaagttgcataaaataatagattaaaagttgcattaaaatatttctcattatagctaagatataacag

SEQ ID NO: 49348 - DNA, 201 bp, Homo sapiens
ttaaggctgcttaaaaaaaataaaaaatactactagatgacatatgttagaagtagggaagaaagcaaaaccggaggtagaaacataaacaggaagcagaraaaagctaacaggaaaatgcatatcataaagctatcgaccttgctatgggtgaacttgggtttaagtgaactttttaaacagccaatgcacaaaaaaacc

SEQ ID NO: 49349 - DNA, 201 bp, Homo sapiens
agaatataaatatgcatacacagaacttctgtagatgaatacaattgttgacatgaaaagtaaaaaataaagcatagaaaagaaaggtaaaaaataaaggwtaaaaaaatatattataaactgaaggataccactaatacaacaaacactggatgaaattaatagcacattagacactgtgaaaggaaatagtagaaaata

SEQ ID NO: 49350 - DNA, 201 bp, Homo sapiens
atcaccaccatccactgctcattactttttattgcagctctattttctacccatacttgatgctcttcccagtaggtggcatgtctggttcaactgtactyagccagagttctgaagacattcacatagaggtcaagctttaattattcaggctaaacaaataattgaacagcttgcatggacttttttcagtgggtttaa

SEQ ID NO: 49351 - DNA, 201 bp, Homo sapiens
aaaaaaatctccccttgaccctgcctgccttttccttttctctcctttccttcactaccagttttctgtatgagaactctgtatcattctctacatttctkcgcctatattccttccctaatctgctttagtatgaataagtctactaaaattactctcacaaaagggcacctaggacttgaggtgccagagcctatgttc

SEQ ID NO: 49352 - DNA, 201 bp, Homo sapiens
ggatacaccaacgataaactcctaattttataaactcctagacttcctaatttgcctgaaactttctctgaatttagaaggccttaaggtgacatgctgcmtatctccttgctgactctaatccctggagtttactttgtctgcccatatttgtatttatcttttgtagttaaggaaaattaagactgttaatggaaagta

SEQ ID NO: 49353 - DNA, 201 bp, Homo sapiens
ggcttaagccaaaggtagattttacagcctctaaaaatcattttccttcaggcaaaggctcatatcataaatactgtttctctaaggcatgattttgttakctactctgtgacaatgagctcaagattgtgtattctgcaaggtgtaacaactgcatttttacaaaattgttatgttcttgcacaagattctatcataagc

SEQ ID NO: 49354 - DNA, 201 bp, Homo sapiens
tgcaatttaaagttaataagcttgtttctggatctctaaaggcacaagtgtttatataaaagaaatgatcacctgtgtgtcttttctaaaataagaatgaygctaacagttttagctctcagcagctaccaggtggcacccaaagcatatgagaacaaaatgagataagaaactaggtacccaggtaataggagaatagtg

SEQ ID NO: 49355 - DNA, 201 bp, Homo sapiens; identical to SEQ ID NO: 49077

SEQ ID NO: 49356 - DNA, 201 bp, Homo sapiens
tcttgattcatccctttcttaatatattttaaaatagtgagcaactatctgtgctgaaagaccttttttcccctctaatctccactaagcaacacttttgktttttattctgttaagcgagatgaacgcactggtcatgtgcttagagtcacagcaatgtcaaattgctttagaaaaacaaaagtttactaaatatttcat

SEQ ID NO: 49357 - DNA, 201 bp, Homo sapiens; identical to SEQ ID NO: 8590

SEQ ID NO: 49358 - DNA, 201 bp, Homo sapiens
ctgtagatgaatacaattgttgacatgaaaagtaaaaaataaagcatagaaaagaaaggtaaaaaataaaggataaaaaaatatattataaactgaaggayaccactaatacaacaaacactggatgaaattaatagcacattagacactgtgaaaggaaatagtagaaaatattaatacattgcaatagaaactgcaaag

SEQ ID NO: 49359 - DNA, 201 bp, Homo sapiens
ataaatttctatgggtaatttggcattcacatgcatctaaaatatccatttactgaaaatttatagaaacgtgtggttttttttttaagaagtactggctrcataatatgtggggcccagtgcaaaatgaaaatgtgagtccccttgttcatattattgaaaatttcacagtgactgcaaagcattaaaccaagccagggg

SEQ ID NO: 49360 - DNA, 201 bp, Homo sapiens
ccatctggctgttggaggagctaaagagcagcttgaaaaccatttagccatgtgttttcctacatgcgtgaaagtatttggtatgcatttatgaaaacatmcttttgttttgccttaaatctgaagaagcaggaggggaggttgaataaatactccaaactgtccactgaagtaataggtcttattaggttaaataactta

SEQ ID NO: 49361 - DNA, 201 bp, Homo sapiens; identical to SEQ ID NO: 8592

SEQ ID NO: 49362 - DNA, 201 bp, Homo sapiens; identical to SEQ ID NO: 8593

SEQ ID NO: 49363 - DNA, 201 bp, Homo sapiens
agtggcacttctgtagtgtggggacccagaatgaaattttgaccatccacttcactgggcactcattcatctatggaaagaggcatgaggacaccttgacmctcttccccatgcgtggagaatctgtgacggtcacaatggataatgttggtgagtaagagtctggacactcacagaggaagcttgctttgaatttctggt

SEQ ID NO: 49364 - DNA, 201 bp, Homo sapiens
ttccattttccaccttaatgtgtgagtgaaacactctctccaatgctcctgccaagtgatgaggggaggttactgctcagataaacagatctaattttccyactgtgtgtacacatgtatacacacacaccatccaaaaggtgaatatgcaaagctagtatcttatattatttgtcatgatcaaccttaaatcctagaata

SEQ ID NO: 49365 - DNA, 201 bp, Homo sapiens
atccttagaaatgcgtttgatcttctattccaagcgtgtgtgtgtgtgtgtgtgtgtgtgtgtacacagacatactctgcgtggtgaggaaaagggtgagrgagtaggactaatggaaggtgttatagtccatgtcaatagtatcctagactgagttcagggtgaatatatggctaggacagaaagaaggcaagtaatcca

SEQ ID NO: 49366 - DNA, 201 bp, Homo sapiens
cagcagacatcgaacagcaggctgtgtttgctgtgtttgatgagaacaaaagctggtaccttgaggacaacatcaacaagttttgtgaaaatcctgatgargtgaaacgtgatgaccccaagttttatgaatcaaacatcatgagcagtaagtcagagtactatttttgttcatcagtttttcattcctgtggttgaaata

SEQ ID NO: 49367 - DNA, 201 bp, Homo sapiens
tatttatttacagcttactcagtaatacaaaggatctgagacagtttctcaagttataaaggcataaaacaaggagtctatgtaattgggatagaatatgsggacaaagaaaataaagccacagataagtagataccatgtgaccctgtaaggctgtcttcaaattttgtcctaagctttatggcagtcagtgtaaaaaag

SEQ ID NO: 49368 - DNA, 201 bp, Homo sapiens
tttggaaatattatagaagacgcccatgaggaacaggattctgacttgcttagggtgataggagaatgacactggagtggggagaagacgggtaaaagtaygttgtatgtgagaaattgactaatggagagatgagacaatcattgaggatgtttggacaatgacaagagttcaaagttcttatgcgatggttttattttt

SEQ ID NO: 49369 - DNA, 201 bp, Homo sapiens
cacagatcagatagttgtaggtgcgcagccttatttctgagttctctattctgttccattggtctatgcgtctgttcttgtaccagtactatactgttttktcctccagagggcagcagacatcgaacagcaggctgtgtttgctgtgtttgatgagaacaaaagctggtaccttgaggacaacatcaacaagttttgtga

SEQ ID NO: 49370 - DNA, 201 bp, Homo sapiens
agcatgtgaatttttgtgtatacacatatatacacatacacctatatatacacatacacttatgtatgtgtgggtgatgttgaagaaacatatcaatattwtttcctttagaattgaatgaggttatggtagacgataaatctcccaaaggtaaaaatttatcttagatgactctaaaactcagtttagaccttctgatct

SEQ ID NO: 49371 - DNA, 201 bp, Homo sapiens
ctgtgttaccttagacaagttactgtgttttggctgtactaaaatggagatatttatgagcattatataatacatgtaaagcctgagaacagtatttggcmcttggattcaataaatcttcattgttgtggttattgtttttgtcatttgttggtagtaatattatttcttatctcctctgcagtgcatgaagccatgcag

SEQ ID NO: 49372 - DNA, 201 bp, Homo sapiens
gatcagcaggaagattgcagtaaagatgaacagattaggagtaatcctcaacacacaaaaaaaaccagcatttcaaaaggtgacagaagagtaatattcartggcatctagaatattttctctttccatttgcatttgggcacttatgagaaggcaaaatcatagcaatcgttaagagaaaaaataactaattcccactta

SEQ ID NO: 49373 - DNA, 201 bp, Homo sapiens
gttcttttcagtgacttaggctcctaggaaaacctttgtgaaacagaggttctactcaggtaaactctcagtgtgatctagaccaagaatggttctgccartcagagtgccgacagcatctctgtgaagaaagtgcctggattatatagacacatcacaactctccaaggaagggctctaatttggaattacctccatcag

SEQ ID NO: 49374 - DNA, 201 bp, Homo sapiens
agaatccagcccatctttcattaaaacaaacaaccacagtgagccacagcatgggaaataacgtgatggactcaccatctgcctatacatacacgctcagrccatacctacatacatgcccaatgtatttactcattatacaaagactttttttccatttcctggtatatataagatactgtgatggtactgaaaaaaacc

SEQ ID NO: 49375 - DNA, 201 bp, Homo sapiens
ctttttctgacattgctctgtcaggaaaaggggtagggcacagcctgtttactgccaagtgggggtcaaagtccaggttccccactccattgccacctaaraagggattgttccttggtggctgggtgggaagggaagttccccatttggcctccactgatactgcaggggcaggagcttcattaggggctggagatgaaa

SEQ ID NO: 49376 - DNA, 201 bp, Homo sapiens
gcaggagtatcgcttgaatccggaaggcagaggttgcagtgagccgagatcacgccactgcactccagcctggtgacggagtgagactccgtctcaaaaamaaaaaaaaaaaaaaaatcttttcacagaaccagccttgttttattgatttttctctattgtttttctgttttcagtattaccgatacctgctccaatctt

SEQ ID NO: 49377 - DNA, 201 bp, Homo sapiens
tttatcccatgagaatccagcccatctttcattaaaacaaacaaccacagtgagccacagcatgggaaataacgtgatggactcaccatctgcctatacayacacgctcaggccatacctacatacatgcccaatgtatttactcattatacaaagactttttttccatttcctggtatatataagatactgtgatggtac

SEQ ID NO: 49378 - DNA, 201 bp, Homo sapiens
tttaaattacagatcctatgttctaaatagttacagggctattaaaattatctatgtcatattgggtgaattgaaatactttgtatatttcaattaactgstcaattccctctacgttgttaagtttatatgtgtagagttgtttgtatattcccttatcctttttcatgtttgtagtgattttgcctgtttcatctctga

SEQ ID NO: 49379 - DNA, 201 bp, Homo sapiens
ctatcagtagggaaagtccaatatacatggaggtgttaatgatgtgtctttgggtgcacaaagtacaaagtaagacatctaagtttcaggggatggacacrtttcatattcatacagacaaccagcctgcataggggagttagacgctgtggctcgggggaaaaaattgagataatcagatggctaagatgaaataaagag

SEQ ID NO: 49380 - DNA, 201 bp, Homo sapiens
tctgttatactttcagtcctacctaaagaaaaatggttaaattctatttgaaagcctcttgtgaagcaggaattttaggattcttagagaactatcaaccmcaatatttacttgttaatttttgcaaatgtaatgttgttctttttattttaggttcatttaaaactcttgaaatgaaggcatcaaaacctggctggtggc

SEQ ID NO: 49381 - DNA, 201 bp, Homo sapiens
ctttacaagaacttttattggctgggcttcttaggagcaagcttggattttcattttatcccatgagaatccagcccatctttcattaaaacaaacaaccrcagtgagccacagcatgggaaataacgtgatggactcaccatctgcctatacatacacgctcaggccatacctacatacatgcccaatgtatttactcat

SEQ ID NO: 49382 - DNA, 201 bp, Homo sapiens
gcatctcttctttcttgacttttcaatcatcgccattctgactggcatgagagggcatctcattgcgtttttctttctttttttgagacggagtctcgctstgtcgcccaggctggagtgcagtggcgcaatctctgctcactgcaagctccgcctcccaggctcacgccattctcctgcctcagcctcccgagtagctga

SEQ ID NO: 49383 - DNA, 201 bp, Homo sapiens
aaaaaatctccccttgaccctgcctgccttttccttttctctcctttccttcactaccagttttctgtatgagaactctgtatcattctctacatttcttmgcctatattccttccctaatctgctttagtatgaataagtctactaaaattactctcacaaaagggcacctaggacttgaggtgccagagcctatgttct

SEQ ID NO: 49384 - DNA, 201 bp, Homo sapiens
ttgcgtttttctttctttttttgagacggagtctcgctctgtcgcccaggctggagtgcagtggcgcaatctctgctcactgcaagctccgcctcccaggytcacgccattctcctgcctcagcctcccgagtagctgagactacaggggcccgccaacacaaatacaaaatacaaaaaatataattttttgtatttttag

SEQ ID NO: 49385 - DNA, 201 bp, Homo sapiens
tattttgtacatttgtacattttattttgtataattgattttgtacattaatcttgcatcctgaaactttactgaagtcatttatcagttcctggagcctyttcatggagtctttagggttttctaggtacagaatcatattgccaatgaagagagatactttaacttcttttcttctttggttgccttttatttctttct

SEQ ID NO: 49386 - DNA, 201 bp, Homo sapiens
gcgtattttactgtggggagagtagataaagcctgagaaccctagttatctaatctgagaagtgggcagaggagttgtcataccaataagagaataaacaygacttgctatggttgctggatacaccaacgataaactcctaattttataaactcctagacttcctaatttgcctgaaactttctctgaatttagaaggcc

SEQ ID NO: 49387 - DNA, 201 bp, Homo sapiens
aagaaggaaatattttctctttttttttttaaacaggaaatagaagagacaaattagaagctagagaagaaatgtgcagccttgttaggtatagtgacctragtaggtttcaccttggcctgtactttgaataagaccttaaggtatcagctcagccactctctccgagttctgcagttcctctatatgatgaccatggct

SEQ ID NO: 49388 - DNA, 201 bp, Homo sapiens
ttaacaagaccatactacagtgacgtggacatcatgagagacatcgcctctgggctaataggactacttctaatctgtaagagcagatccctggacaggcraggaatacaggtattttgtccttgaagtaacctttcagaaattctgagaatttcttctggctagaacatgttaggtctcctggctaaataatggggcatt

SEQ ID NO: 49389 - DNA, 201 bp, Homo sapiens
acctatacttataagtggaacatcttagagtttgatgaacccacagaaaatgatgcccagtgcttaacaagaccatactacagtgacgtggacatcatgaragacatcgcctctgggctaataggactacttctaatctgtaagagcagatccctggacaggcgaggaatacaggtattttgtccttgaagtaacctttca

SEQ ID NO: 49390 - DNA, 201 bp, Homo sapiens
tatctaatggctacatgttatccaggttccaagtagaatatttaaagaattcaattgaacaatgagaacatttagacacaggatggggaacatcacacacyggggcctgtcggggggggggggtggggggcggggggagggatagcattaggagatatacctaatgttaatgacaagttaatgggtgcagcacaccaacat

SEQ ID NO: 49391 - DNA, 201 bp, Homo sapiens
ttgatttaactttgtagatcgtgttcaaaaatatggccagccgcccctatagcatttaccctcatggagtgaccttctcgccttatgaagatgaagtcaaytcttctttcacctcaggtttgaatctttcacttctactgaatccaactagtaacttctgagaggctgccacatttttctgctattctccttgcccggtgg

SEQ ID NO: 49392 - DNA, 201 bp, Homo sapiens
ggaatagggaaggaagaagacaaagaaaggaagaaaggagaaaagaaaagaaactaggaaaggaaaaagaaaagaaagggaagagaaaggaaggggagggraaggattaatcatttcagttttcaaaaagtgtagttgcttcagtaagaggagttttattggccttttaccccatcatgtaaaacatttcaggcttttttc

SEQ ID NO: 49393 - DNA, 201 bp, Homo sapiens
atccaacacaaaagggtgtgtaatgatgattccattgatatgacattacagaaaagccaaattatagtgaaataaagcagattagtggttgtctgggcccrgagggcattggctacaaatggcatgaagaaatgttttggaatgatggaactcttctctatcttgattggaactatagctataagactgggtaattgtttt

SEQ ID NO: 49394 - DNA, 201 bp, Homo sapiens
gacttgtcattaaaacaatcaaaaagtaagtaaaaataacaattgaaaatcctcacatcatcttcacatcttcttcccttaggcagagcttcgaccactasagctagagagctgagaggattaagtgcttgaactcagccctattggcggttctggtgatttgactccctccagctgagatcagactggggtgaccaaaca

SEQ ID NO: 49395 - DNA, 201 bp, Homo sapiens
atataaagatggcagttttaaattcaaccatatcatcaattacattaaaagtaaatggaaagaacactacaattaagaaacaaataagattgaataaaaaagcaatgctaaactgtatgcagaatttaagaaatccactttaatgagagagacaaagataggtaaaaaataaaggatagaaaattatataccataccagct

SEQ ID NO: 49396 - DNA, 201 bp, Homo sapiens
cttttgttgaaatgcttttgaggaattagtcataaattctttcccaaggctgatatccagaatggtgtttcctaggtttttcttctaggattcttatagtktgaggtctgacatttaaatctttaatccattttgagttaatttttgtatatgatgaatccagtttcattggattcattggggttcagtttcattcttcca

SEQ ID NO: 49397 - DNA, 201 bp, Homo sapiens
acactgcattttaaggagagtgtgtaaccccaaagtgatttcgttgacttgtcattaaaacaatcaaaaagtaagtaaaaataacaattgaaaatcctcayatcatcttcacatcttcttcccttaggcagagcttcgaccactagagctagagagctgagaggattaagtgcttgaactcagccctattggcggttctgg

SEQ ID NO: 49398 - DNA, 201 bp, Homo sapiens
tcctttagatagaagaaatattatgtcagagagacatttagattcataagaaggaatgaaaagttccagaagttgataaatatagagaaattttttcctcrttttaatctattaaaaaggcaattgattatctaaatgttaaagcaaaatagtaacaatttattgtggggtatattatgtatatataaataaaatgtatga

SEQ ID NO: 49399 - DNA, 201 bp, Homo sapiens
tatttttagtagagacagggttttaccatgttggccaggctggtctcaaactcctgacctcgggcaatctgcctgcctcagcttcccaaagtgctgggatkacaggcatgagccattgcgcccggctgaacaatttattttcttttttggctatatacccagtaatagaattgctaggtcaaattgtagcaggacaagcca

SEQ ID NO: 49400 - DNA, 201 bp, Homo sapiens
cttccaccaaagcctcctagtgatgcaaggaatcctggctttgttgcaatggtctcctaaaaaaaacaagcctttgtgtgggtaaggaactgattctcagscccattatctagtatctagtgattatgtatctgagatgtaaaacagaaacctaaaagccaaggatggagtctccccacagagcaaatgagcattttccca

SEQ ID NO: 49401 - DNA, 201 bp, Homo sapiens
gcagaaagaatttctcactaacagagcagaaaaaaatgttaaaggaactcctttagatagaagaaatattatgtcagagagacatttagattcataagaargaatgaaaagttccagaagttgataaatatagagaaattttttcctcgttttaatctattaaaaaggcaattgattatctaaatgttaaagcaaaatagt

SEQ ID NO: 49402 - DNA, 201 bp, Homo sapiens
catgtttctactgactcttattgctccaggcagagcccaacctatccatagctatatgctaatcaatatgatttaattgaagttagcctcaaatccaaacycaaatatgatgtagaaatctcctttttgcatttacttgtttagatcagaatttctaagagatccaaatcccttttttaaaagaatatttacaattcagtt

SEQ ID NO: 49403 - DNA, 201 bp, Homo sapiens
aagtatatggatgccaagaaaagcaaaaccatatgcacaaaaataaaaataaattgatctgagcttagagtttacgaatttatagttcccaaaagaataaytgggggtaaatgggacaaggtagggaaagaccatcagtagaaactaagaatagtaaacatttgtaaaaaccctctgccttataaagcagaataaattgaa

SEQ ID NO: 49404 - DNA, 201 bp, Homo sapiens
tgtgagaactctataatattctgtaattaagcatttttctgtgtcctctcctcttactacccatgtttctactgactcttattgctccaggcagagcccarcctatccatagctatatgctaatcaatatgatttaattgaagttagcctcaaatccaaactcaaatatgatgtagaaatctcctttttgcatttacttgt

SEQ ID NO: 49405 - DNA, 201 bp, Homo sapiens; identical to SEQ ID NO: 8577

SEQ ID NO: 49406 - DNA, 201 bp, Homo sapiens
aggtacaattaaagaagggaagctgacattgctgtaatgtaaaaaaatattttatatggaaatttagcatctcagactttggcttcagaacataaggaacmagatttaccctttttctcaacaactagacaggcagacaaaacatataaaacagaagttttcagacatcgaatgacagacaactcaagacagtaaaagaag

SEQ ID NO: 49407 - DNA, 201 bp, Homo sapiens; identical to SEQ ID NO: 8578

SEQ ID NO: 49408 - DNA, 201 bp, Homo sapiens
aatacaatccagcacttttccttgaggaactcacacttgggtgaccaaaatgtgcaggacacaaatacttatgatctagtagaagaaaatgaattagtcayataatctcacaggcatttaattacaaattgtgatgggtgctgtaaaagaaaaaaatgtgtatcagaattggagataaaggtagaagtgaacagatattca

SEQ ID NO: 49409 - DNA, 201 bp, Homo sapiens
tgaacaaaattggtccagtaagaactgatcatcagaaagcagaaaagggcagctaagatccagatccaacaaaattctgtgcaggagtttggtcctgttgytaaccagatctccaggtttttgttttttaaagagaaaccagtaatccaaattcttatataatttctccggatgtttaatgttggcatttaatctatttta

SEQ ID NO: 49410 - DNA, 201 bp, Homo sapiens; identical to SEQ ID NO: 8581

SEQ ID NO: 49411 - DNA, 201 bp, Homo sapiens
acttggtgatgaaatccgtgggtgacatcatagcaacatttttaagcaagaggtcaaaggctcacatccttagaaatgcgtttgatcttctattccaagcrtgtgtgtgtgtgtgtgtgtgtgtgtgtacacagacatactctgcgtggtgaggaaaagggtgagagagtaggactaatggaaggtgttatagtccatgtc

SEQ ID NO: 49412 - DNA, 201 bp, Homo sapiens
gaatagagaatcctttccctattgcttgcttttgtcacagatcagatagttgtaggtgcgcagccttatttctgagttctctattctgttccattggtctwtgcgtctgttcttgtaccagtactatactgttttgtcctccagagggcagcagacatcgaacagcaggctgtgtttgctgtgtttgatgagaacaaaagc

SEQ ID NO: 49413 - DNA, 201 bp, Homo sapiens
cttaacaagaccatactacagtgacgtggacatcatgagagacatcgcctctgggctaataggactacttctaatctgtaagagcagatccctggacaggygaggaatacaggtattttgtccttgaagtaacctttcagaaattctgagaatttcttctggctagaacatgttaggtctcctggctaaataatggggcat

SEQ ID NO: 49414 - DNA, 201 bp, Homo sapiens
atcaagtttctcaggaactttttaaaaaatccgcgtattttactgtggggagagtagataaagcctgagaaccctagttatctaatctgagaagtgggcaraggagttgtcataccaataagagaataaacatgacttgctatggttgctggatacaccaacgataaactcctaattttataaactcctagacttcctaat

SEQ ID NO: 49415 - DNA, 201 bp, Homo sapiens
tgcaatgaaatcagctctttataaaacgtcagcattgattcgcccattgcctacattatagcttctaaaagaatattctgaatctttgaatgtagtgaagsattcactaagtttattaacttaggagaggaaaagagttgttcacaaaaataagtaacaagggaagagttactgagtgagcaccctaatgagtaaccaaaa

SEQ ID NO: 49416 - DNA, 201 bp, Homo sapiens
aataaatctaaggcttggctgatccaggccccacttggctgctgaagggctggaggtgggaagagggatcaataaataggtgcactagaaacctgccatgrcacacctgtcaggagttgcagtacttccctttgggtggagagaagccaccatgattcacaatggagaaagtagctgaaacctggaatcagtttcctgttg

SEQ ID NO: 49417 - DNA, 201 bp, Homo sapiens
cctcagagccagagagctgtgtgatttggttcctcaattcatctaggtctctgagcacacccatgtcagagaaatctaaagtaactaccctctcgcatcamcctctgtaattgaaatgaacatctttcttaagcaaagaaagttattgctaaggaatgacagtgggtcaaagtgggcaagacttggccagaactatttctc

SEQ ID NO: 49418 - DNA, 201 bp, Homo sapiens
gctttacctgttttttctagtgccacttccccttggttttctcagacttctcttaccactcctgctcagtatccccaccagatattcttccccagggttcsaatctcacccaaaaccaaggctttcactactacctacccagaagccactttccctctgaagctacattgacaccccctcaataccagcagaattaaatct

SEQ ID NO: 49419 - DNA, 201 bp, Homo sapiens
ctactatttgctgtgtttgatgaaagcaagagctggagccagtcatcatccctaatgtacacagtcaatggatatgtgaatgggacaatgccaggtaacaygagggctgtgtaccattaaacaacagtaaaatcattagtaatttttcggtcctgttttcttcaaagcactagagaagttgaccatactcactgttttgca

SEQ ID NO: 49420 - DNA, 201 bp, Homo sapiens
cttcttggactcttaaagcagtgctttccaatattttttacttcaaagcacacaaagaaaataatatctgcctggcattctgaggtaaaagaatgaagcawtaaatctaaggcttggctgatccaggccccacttggctgctgaagggctggaggtgggaagagggatcaataaataggtgcactagaaacctgccatggc

SEQ ID NO: 49421 - DNA, 201 bp, Homo sapiens
aatggagtatcagtgaggacagtggacccacccatgatgaccctccatgcctcacacacatctattactcccatgaaaatctgatcgaggatttcaactckgggctgattgggcccctgcttatctgtaaaaaaggtaagaacacccccaccaaaagattcaacaactaaatgttggaatggtcaggagttctgtcatggg

SEQ ID NO: 49422 - DNA, 201 bp, Homo sapiens
gacagaaagaaggcaagtaatccaaagatggattgacacatcaaagtagagcaaaatgagtatagggacccaagagtcttggaaaggcatgcatgaagacrtttcaagtgatcagtaagattttcagaacaaaaggaattccctgaatgagggttccggcatttgctgcagttctaaagttcagtggccaaaagcactgcc

SEQ ID NO: 49423 - DNA, 201 bp, Homo sapiens
gatttgagagtggtgaaaacgcaatcctcagaaactgcccacatgtcttgatggctgttactcctccaggtgcttcttaccttgaccacacattccctgcrgagaagatggacgacgctgtggctccaggccgagaatacacctatgaatggagtatcagtgaggacagtggacccacccatgatgaccctccatgcctca

SEQ ID NO: 49424 - DNA, 201 bp, Homo sapiens
tcccaaagagaaattctgtcaccagctgatgatagggaatctttcacctaattaaatgaggaattcctcaggcagaggaaactgttcattccacttggctmtctatggcactcacctctccccttcctgacctcacttgctccattttattattgaaaacctcacccaaccctctacacttcttttaatattgagtatctc

SEQ ID NO: 49425 - DNA, 201 bp, Homo sapiens
ttttctgcctacggctagccagttttcccagaaccatttatggaatagagaatcctttccctattgcttgcttttgtcacagatcagatagttgtaggtgygcagccttatttctgagttctctattctgttccattggtctatgcgtctgttcttgtaccagtactatactgttttgtcctccagagggcagcagacatc

SEQ ID NO: 49426 - DNA, 201 bp, Homo sapiens
cagtttcaattttctgcctacggctagccagttttcccagaaccatttatggaatagagaatcctttccctattgcttgcttttgtcacagatcagatagytgtaggtgcgcagccttatttctgagttctctattctgttccattggtctatgcgtctgttcttgtaccagtactatactgttttgtcctccagagggca

SEQ ID NO: 49427 - DNA, 201 bp, Homo sapiens
agacacaacaaagtccactttatgctagcgcaaagttcacaaactcagatgcctatagtagccagataagtagttcagtgaacaaaattggtccagtaagdactgatcatcagaaagcagaaaagggcagctaagatccagatccaacaaaattctgtgcaggagtttggtcctgttgttaaccagatctccaggtttttg

SEQ ID NO: 49428 - DNA, 201 bp, Homo sapiens
tgaaataaaccaccccaaaacttagtgttaaaagagcaaccaaaaaaaatttatgtgagattatggatttgttacttagcttgatttaatcatcctgtaaygtgtacatatatcaaaatgttatgtataccataaatatataaaattttatcaacgaaattcataacaatctctcagaccacagagaaatcaaattagaac

SEQ ID NO: 49429 - DNA, 201 bp, Homo sapiens
tttcttttcttttcttttcttttttttttttttttagtagagacgggttttgccatgttgaccagactggtcttcaactcctgacctcaggtgatccaccsgccttggcctcccaaagtgctggtattacaggcgtgagccaccgcgccaggcctacatttaagtctttaatccatcttgagttaatttttgtatatgatg

SEQ ID NO: 49430 - DNA, 201 bp, Homo sapiens
caaagtgaaagtacagcctagagtaaatattagttattagtgtcaagctatcctttggggtgtgttgggggaagacacaacaaagtccactttatgctagygcaaagttcacaaactcagatgcctatagtagccagataagtagttcagtgaacaaaattggtccagtaagaactgatcatcagaaagcagaaaagggca

SEQ ID NO: 49431 - DNA, 201 bp, Homo sapiens
ttttgtagtttggggttttacgtttaagtgtgttgttgttgttttttgtttgtttgtttctgttatttttgagatggagtctcgttctgttgcccaggctrgagtgcagtggtacgatctcagctcactgcaacctctgcctcccatgttcaggtgattctcctgcctcggcccctcggcctcccgagtagctgggattac

SEQ ID NO: 49432 - DNA, 201 bp, Homo sapiens; identical to SEQ ID NO: 8601

SEQ ID NO: 49433 - DNA, 201 bp, Homo sapiens
tttgattacaaagtcaaaatcacattcaccaaaactgcatctcacaaatgcttcctcttaatagctgtttgtattttatactttatattaatgtatgttgyaaaatcaaagatacaacaaacctgttttattctagactaaaggtaaaataatttgaagtgaaaagaataaaagcattgataaaattacaccccaattgtc

SEQ ID NO: 49434 - DNA, 201 bp, Homo sapiens
ccatacctacatacatgcccaatgtatttactcattatacaaagactttttttccatttcctggtatatataagatactgtgatggtactgaaaaaaaccktaaaacttacaaaagactcttcttgcattttaccatcagcagcatgtttttctcatagtgagaatggattaatgctgatacttccacccaattatctaat

SEQ ID NO: 49435 - DNA, 201 bp, Homo sapiens
caggagctctttatttcaattaaatcccatttgacaatttttgcttttgttgctattgcttttggcatgttcgtcatgaaagctttgcccatccctatgtyccaaataatattgcctaggttgtcttccagggtttttgtagtttggggttttacgtttaagtgtgttgttgttgttttttgtttgtttgtttctgttatt

SEQ ID NO: 49436 - DNA, 201 bp, Homo sapiens
aacaaaatccttttgagctctgtgcttttttgcataacttggtctaaaaaaaaagcaaaggttttaacatcttccttatctatgtgtttttgtcattttcrtaggcaaacaacaataagcagtggctagaaattgatctactcaagatcaagaagataacggcaattataacacagggctgcaagtctctgtcctctgaaa

SEQ ID NO: 49437 - DNA, 201 bp, Homo sapiens
tctcttcttttcagtttagagcttaattttttttattttgattacaaagtcaaaatcacattcaccaaaactgcatctcacaaatgcttcctcttaatagytgtttgtattttatactttatattaatgtatgttgtaaaatcaaagatacaacaaacctgttttattctagactaaaggtaaaataatttgaagtgaaaa

SEQ ID NO: 49438 - DNA, 201 bp, Homo sapiens
gttctttttgatggtcacatagtattctatggtgtatatgtaccatattttcttcatccagtctgtcattgatgggcatttgggttgatttcatgtctttrctattgtgaagagtgcgaaaatgaacatacgcatgcatgtgtctttataacagaatgatttatattcctttgggtacataccaagtaatggaattgctgg

SEQ ID NO: 49439 - DNA, 201 bp, Homo sapiens
ttgtggttattgtttttgtcatttgttggtagtaatattatttcttatctcctctgcagtgcatgaagccatgcagggaatattggtgtgtaattaatcamgttacttttcttttgataggatgttccacacccctgggtatggaaaatggaaagatagaaaacaagcaaatcacagcttcttcgtttaagaaatcttggt

SEQ ID NO: 49440 - DNA, 201 bp, Homo sapiens
gcagctgaacaaggacttcttgtgctctagcacaatagttgtccctgtccatttctcttcttttcagtttagagcttaattttttttattttgattacaaagtcaaaatcacattcaccaaaactgcatctcacaaatgcttcctcttaatagctgtttgtattttatactttatattaatgtatgttgtaaaatcaaaga

SEQ ID NO: 49441 - DNA, 201 bp, Homo sapiens
gcctagtatccattagttattttttctgatcctctccctctttccaccctccatcctctgataggccccagtatgtattgttcccttctatgtgtccatgygttctcataatttagctttcacttgtaagtgaaaacatgcagtatgtggttttctgttcttgcgttaacttgcttagaataatggcctccagctccatcc

SEQ ID NO: 49442 - DNA, 201 bp, Homo sapiens
aacggctatagtttgtatatttaataaatcacaaaaatgtggatcccttttccaaagagacttgcaagtcctgtgcaatgaaatcagctctttataaaacrtcagcattgattcgcccattgcctacattatagcttctaaaagaatattctgaatctttgaatgtagtgaagcattcactaagtttattaacttaggaga

SEQ ID NO: 49443 - DNA, 201 bp, Homo sapiens
ctcagtctcttgagtagctgggattacaggcgcccgccaccacccccatgtaatttttgtattttttagtagagacagggtttcaccatgttggctaggcyggtctcgaactcctgacctaaggtgttccacctgcctcagcctcccaaagtgctggtattacaggtgtgagccactgtgcccggctcttttgggatattt

SEQ ID NO: 49444 - DNA, 201 bp, Homo sapiens
gggttcaagtgattctcctgcctcagtctcttgagtagctgggattacaggcgcccgccaccacccccatgtaatttttgtattttttagtagagacaggrtttcaccatgttggctaggctggtctcgaactcctgacctaaggtgttccacctgcctcagcctcccaaagtgctggtattacaggtgtgagccactgtg

SEQ ID NO: 49445 - DNA, 201 bp, Homo sapiens
tcccaattatgctaaactgtaaccaaagaggtcttatctcaaggcatacaaaataaacatatgcctagaaaaagcagaaatgaatttctggacatatggamgatcctgatttattgagctaggaaaggaaacaggtagtagaagcataaggcttttctattgcaaccttctctttcatcctttgcacttattcagagcata

SEQ ID NO: 49446 - DNA, 201 bp, Homo sapiens
cccttatcctttttcatgtttgtagtgattttgcctgtttcatctctgatattgtcatctgcccctcctttcttttttgtgtgaatcttgctagagatttktcgattttaaaaaaatcttcttggccgggcgcagtggctcacgtctgtaatcccagcactttgggaggccgaggtgggcagatcacgaggtcaagagatc

SEQ ID NO: 49447 - DNA, 201 bp, Homo sapiens
gaataagtctactaaaattactctcacaaaagggcacctaggacttgaggtgccagagcctatgttcttttactactagacattactaggacatttaacaytcttcctttctgaagctctcgctttacctgttttttctagtgccacttccccttggttttctcagacttctcttaccactcctgctcagtatccccacca

SEQ ID NO: 49448 - DNA, 201 bp, Homo sapiens
cctaattaaatcacactgggtcacagtgatttctgcccttagatattcacaagattagacatgagatgcttctgagacacccagagctacaactaaaaccrgttccttaacattccagagggctgatgtaatctggcaggtgacactgtgggtgaggcaaaaagagaaagtctgaaagatagcacagagaagctgctgcaa

SEQ ID NO: 49449 - DNA, 201 bp, Homo sapiens
ctaatccctggagtttactttgtctgcccatatttgtatttatcttttgtagttaaggaaaattaagactgttaatggaaagtatacacgggtaaagcacrgaactgtaaaagctgaggaaaagagtgataaactgcttggaaagggagttccccctgccttctgctgtaggctggtgtgaatgatatgagaaggactagt

SEQ ID NO: 49450 - DNA, 201 bp, Homo sapiens
ggcaagaggattacttgagaggagtttaaggctgcagtgagccatgactgtgccactggactcaagcctgggcaacagaataagaccctgtctaaaaaaamacaaaaacaaaaaaccttagccatttatgttgtcattaaagattttctcttatttggctttcagatttttgaaggaaatactaataccaaaggacatgtg

SEQ ID NO: 49451 - DNA, 201 bp, Homo sapiens
gacctacctgagattcaaactaggcctgactcttccaaagtcctcaggtcactcaaacttcaatgtcatgacagtatctggcaacatcactgccatatatrtggtgttcaatgagtgtttttgaaatctgaattggcttcccaacttcctgaaaccacaattcttctttatattttctttcataccctgtgtaggtactca

SEQ ID NO: 49452 - DNA, 201 bp, Homo sapiens
tcagtgacttttatgaagttatttaacctctgtgtgcctcatctttctcatctgtaaaatggtaataataatcatgtctctgtcatacaggtttgttgtcrtgaaatcttagaataatgactggcatataacagataataaatattagccatgatagtaaagataattcttcaattaaaatgtgttcaaataatttagtat

SEQ ID NO: 49453 - DNA, 201 bp, Homo sapiens
ctgccccttcctttcacatactaagctccacctccccactggataactgtcagttctctaaaaaggccacattttctggcacctcagggcctttgcgcacrctactctaactttttagaatgtctttggccatcccttttcctctctgcctttggacctcagttaaaggattaattcctcgggaagggattccccaactca

SEQ ID NO: 49454 - DNA, 201 bp, Homo sapiens
caacatccaggtagcacagtggctggtatcccttccttgatcaagatataaataaccttgtaactttgaggtcaacttttgagaacatagtctcatcaggrctagaactttttttcatatttttatattttgtatttttattttttttgtagagaagaggttgcccaagatcaaactcctggcctcaagtaatcctccccc

SEQ ID NO: 49455 - DNA, 201 bp, Homo sapiens
tctgttcttgtaccagtactatactgttttgtcctccagagggcagcagacatcgaacagcaggctgtgtttgctgtgtttgatgagaacaaaagctggtmccttgaggacaacatcaacaagttttgtgaaaatcctgatgaggtgaaacgtgatgaccccaagttttatgaatcaaacatcatgagcagtaagtcagag

SEQ ID NO: 49456 - DNA, 201 bp, Homo sapiens
ttaaagaattcaattgaacaatgagaacatttagacacaggatggggaacatcacacaccggggcctgtcggggggggggggtggggggcggggggagggrtagcattaggagatatacctaatgttaatgacaagttaatgggtgcagcacaccaacatgacacatgtatacatatgtaacaaacctgcacgttgtgcac

SEQ ID NO: 49457 - DNA, 201 bp, Homo sapiens
tacagacatagtttaaatatttgttttcacaggacttcttgggcctactttatatgctgaagtcggagacatcataaaagttcactttaaaaataaggcasataagcccttgagcatccatcctcaaggaattaggtacagtaaattatcagaaggtaagataaatctaatatttttctgaaaagggaaaatgtctaagtc

SEQ ID NO: 49458 - DNA, 201 bp, Homo sapiens
attattggcatataatattgcctctggtcctatgaatctaagaaaggtaaatacatattggtagggaaagtaaaattttaccttggaaatgagatgcaaayctagtaagcagatagtatcttttatggtaaaagacaagccttataagttgattttattatgccctctgcattaaaataaaacatctcctcctccatgtct

SEQ ID NO: 49459 - DNA, 201 bp, Homo sapiens
agggcctttgcgcacgctactctaactttttagaatgtctttggccatcccttttcctctctgcctttggacctcagttaaaggattaattcctcgggaarggattccccaactcacctccaattggactagattccactgtcaaatactcttcagagtattccctccttttctgtcataatatttaccataggtttaaat

SEQ ID NO: 49460 - DNA, 201 bp, Homo sapiens
ccagaaatcagagtttaccattgcttctgtaaccagttactgcaaacttagtggctaaaacaacacaaatttattcttttatgattatatatctgcagatsagaagtccaaaatgggttttattgggctaaaatcaaggtgttggcagagctgcattccttctggaggctctgggggagaattgtttccttgtcttttcca

SEQ ID NO: 49461 - DNA, 201 bp, Homo sapiens
taatgggtgcagcacaccaacatgacacatgtatacatatgtaacaaacctgcacgttgtgcacatgtaccctagaacttaaagtataatttaaaaaaaawaaaaataaaagaattccttttgcaatattaattggttccagcgaaagcttatttatttatttattatcatgaaataactttgcaaatgaaaacaattttg

SEQ ID NO: 49462 - DNA, 201 bp, Homo sapiens
cccagaaatcagagtttaccattgcttctgtaaccagttactgcaaacttagtggctaaaacaacacaaatttattcttttatgattatatatctgcagaygagaagtccaaaatgggttttattgggctaaaatcaaggtgttggcagagctgcattccttctggaggctctgggggagaattgtttccttgtcttttcc

SEQ ID NO: 49463 - DNA, 201 bp, Homo sapiens
cacttctactgaatccaactagtaacttctgagaggctgccacatttttctgctattctccttgcccggtggtgtcactactgcagtcaggtagtatacaygtaggagtatcctaaaaatcacagccaaacccttctcacttcaggagttttgtctcttagtggtaacaaaatatggtgtcttttattagtgtcatagtgg

SEQ ID NO: 49464 - DNA, 201 bp, Homo sapiens
ccaaggcagatggatcacttgaggtcaggagttccagaccagcctggcccacatggtgaaaccccgcctctactgaaaatacaaaaattagttgtgcatgrtggtacatgcctgtagtcccagctactcaggaggctgagacatgagaatcacttgaacccaggaggtggaggctgcagtgagctgacatcgcatcacttc

SEQ ID NO: 49465 - DNA, 201 bp, Homo sapiens
gcctcccaaagtgctggggttacaggtttgagccactgaacctagctgagaagatgacttcaaagacagtgtcctaaaaaatctaccgggcaggggaaggkgatcatggtctagagatgagaagcagattcaaaatgagatgtggcccaagctgaaaagagaagggcaggggaaggaggacttgcttggagagagtgatac

SEQ ID NO: 49466 - DNA, 201 bp, Homo sapiens
tgaggccaggcgtggtggctcatgcactttgggaggccaaggcagatggatcacttgaggtcaggagttccagaccagcctggcccacatggtgaaacccmgcctctactgaaaatacaaaaattagttgtgcatgatggtacatgcctgtagtcccagctactcaggaggctgagacatgagaatcacttgaacccagga

SEQ ID NO: 49467 - DNA, 201 bp, Homo sapiens
tgggctcaggcgattctcgcacctcagcctctcaagtagctgggactacaggcacacgccccaacgcctggctaatttttgtatttttttgtagagatgakgtttcaccatgttgcccaggctggtcttgaactcctgagctcaagtgatccacctgcttcagcctcccaaagtgctggggttacaggtttgagccactga

SEQ ID NO: 49468 - DNA, 201 bp, Homo sapiens; identical to SEQ ID NO: 49099

SEQ ID NO: 49469 - DNA, 201 bp, Homo sapiens
gtgcagcacaccaacatgacacatgtatacatatgtaacaaacctgcacgttgtgcacatgtaccctagaacttaaagtataatttaaaaaaaataaaaawaaaagaattccttttgcaatattaattggttccagcgaaagcttatttatttatttattatcatgaaataactttgcaaatgaaaacaattttgaatata

SEQ ID NO: 49470 - DNA, 201 bp, Homo sapiens
tttgatttgcatttctctcatgaacactgatgttgagctttttaaaatgtgctttttggccgcatgtagttgcttttgcaaactaaggtaataaagagggmaggggaaaagtggttcatgtttctgctcccaaagtatttatcccagtagctacaaaagatgggtgaaggaggttgcttttcagtcagctcagagaattgg

SEQ ID NO: 49471 - DNA, 201 bp, Homo sapiens; identical to SEQ ID NO: 49100

SEQ ID NO: 49472 - DNA, 201 bp, Homo sapiens; identical to SEQ ID NO: 8461

SEQ ID NO: 49473 - DNA, 201 bp, Homo sapiens
ttatgtgaatgtattttctattaaaaacaattaaactaggaaaaagaacaaaaaaaatttggccaagattatagaattgttgacagaactgagataggaawccaggagtgtttggcaacagtcagtgctttccactgggaaaaataaattcataaaatgatattccatcttaaaagattgctgggttaaatgatatttctg

SEQ ID NO: 49474 - DNA, 201 bp, Homo sapiens; identical to SEQ ID NO: 49103

SEQ ID NO: 49475 - DNA, 201 bp, Homo sapiens
aaattaatatatggctacctagaaaattcagggagggtagggaggtcattttgagagtcatcagagaaaagtgagagttttcactgtaataaaaattatgygaatgtattttctattaaaaacaattaaactaggaaaaagaacaaaaaaaatttggccaagattatagaattgttgacagaactgagataggaatccagg

SEQ ID NO: 49476 - DNA, 201 bp, Homo sapiens; identical to SEQ ID NO: 49104

SEQ ID NO: 49477 - DNA, 201 bp, Homo sapiens
tttcttatttgtaagacataaaggtattctggaattacacgcatgaaattaatatatggctacctagaaaattcagggagggtagggaggtcattttgagrgtcatcagagaaaagtgagagttttcactgtaataaaaattatgtgaatgtattttctattaaaaacaattaaactaggaaaaagaacaaaaaaaatttg

SEQ ID NO: 49478 - DNA, 201 bp, Homo sapiens
gggggtcaaagtccaggttccccactccattgccacctaagaagggattgttccttggtggctgggtgggaagggaagttccccatttggcctccactgayactgcaggggcaggagcttcattaggggctggagatgaaagccctaaatccctacatggccttttctgacacaaccccagtgagggtgtagggtgcctct

SEQ ID NO: 49479 - DNA, 201 bp, Homo sapiens; identical to SEQ ID NO: 49105

SEQ ID NO: 49480 - DNA, 201 bp, Homo sapiens
tgtattggtttctattcaagtctttttgtaaaaattaatcttgaattacccccaaatcaccaaagaaattcagcctaataataataaaaatgacaacagcrgctaccttttgttgaatgtttgccattgccaagcactgtattgtccctttctgagagcttcgcttcaactctacaaactagatactgctcttatttcttt

SEQ ID NO: 49481 - DNA, 201 bp, Homo sapiens
tggttgaaatatgactgtgcctagagtcagagacatggattaaaatctactcgctaaggggcacctccaatcctcacttccagtccaaagacttggtgatraaatccgtgggtgacatcatagcaacatttttaagcaagaggtcaaaggctcacatccttagaaatgcgtttgatcttctattccaagcgtgtgtgtgtg

SEQ ID NO: 49482 - DNA, 201 bp, Homo sapiens; identical to SEQ ID NO: 49107

SEQ ID NO: 49483 - DNA, 201 bp, Homo sapiens
ctgagtaggtttcaccttggcctgtactttgaataagaccttaaggtatcagctcagccactctctccgagttctgcagttcctctatatgatgaccatgscttcttcaaggacaagccctagcaggaaggatcagcaggaagattgcagtaaagatgaacagattaggagtaatcctcaacacacaaaaaaaaccagcat

SEQ ID NO: 49484 - DNA, 201 bp, Homo sapiens; identical to SEQ ID NO: 49108

SEQ ID NO: 49485 - DNA, 201 bp, Homo sapiens
ataataaaagttcactattgaaggacatatgcatctccagagaactcatcttagctatccccagatttgagagtggtgaaaacgcaatcctcagaaactgyccacatgtcttgatggctgttactcctccaggtgcttcttaccttgaccacacattccctgcggagaagatggacgacgctgtggctccaggccgagaat

SEQ ID NO: 49486 - DNA, 201 bp, Homo sapiens; identical to SEQ ID NO: 49109

SEQ ID NO: 49487 - DNA, 201 bp, Homo sapiens
ggaaagtccaatatacatggaggtgttaatgatgtgtctttgggtgcacaaagtacaaagtaagacatctaagtttcaggggatggacacatttcatattyatacagacaaccagcctgcataggggagttagacgctgtggctcgggggaaaaaattgagataatcagatggctaagatgaaataaagagataaaacaaa

SEQ ID NO: 49488 - DNA, 201 bp, Homo sapiens; identical to SEQ ID NO: 49110

SEQ ID NO: 49489 - DNA, 201 bp, Homo sapiens
tattggccggtagttttcattattcattgtgtctttgccaggttttgttattagggtgatgctggctttgtagaataaaataaggaacagacaattagggrgtctttaatcactagaagttatagaagggctgggaggagcttcatgggtctgactgctggggtgtgaagacttctcatatggcatttaagtcctttacca

SEQ ID NO: 49490 - DNA, 201 bp, Homo sapiens
tgcaccagaacccaaccatgctggcaccctgattttaaacttccagcctccagaactgtgaggaagaagtgtccgttgtttataagccactcaatccaggktactttgttaacagcaacccaaactaagaaaatcaccaatttctatcttactcacatgtgttaccagaactcaagcacacttaagatctatcttatctaa

SEQ ID NO: 49491 - DNA, 201 bp, Homo sapiens
ctggttattttttaattttaaaagaaaaagatgctcatataattttaaattcaaatgcaacttttagtttttatttagtatttgtatttatttacagcttrctcagtaatacaaaggatctgagacagtttctcaagttataaaggcataaaacaaggagtctatgtaattgggatagaatatgcggacaaagaaaataaa

SEQ ID NO: 49492 - DNA, 201 bp, Homo sapiens
agaaactaccagagttacctgttgcccataccagtggggtaagccctatgaatgtatatgagagtttcaaacatccacaaaacattggctttctaatattygtattcccactattcctttcttttcatgattcatgtcattgtcccatcaacatttctaagatttccattccgttaagagcaaaagagaatgttggaaggt

SEQ ID NO: 49493 - DNA, 201 bp, Homo sapiens
aaattctgactcagccatcaactttttccctaactccccagacagaatttgtgcttcatcctctcttcttctgtaatattttgcccatatctcagcagtcrctcctatcatacatctatctccaaactagcttgtgagttccttcagtacagggactgtatttgatccaggtagccagaaactttctaacacagtgcctgg

SEQ ID NO: 49494 - DNA, 201 bp, Homo sapiens
ttttattgttgttttttgaatatttttgatccaaaattggttgactccatggatgtgtaaccatgaatatgaaccatggtcatggagggctgactatatayaattcctcaaattctgactcagccatcaactttttccctaactccccagacagaatttgtgcttcatcctctcttcttctgtaatattttgcccatatct

SEQ ID NO: 49495 - DNA, 201 bp, Homo sapiens
gcaataacctatgcacatcctctcatatactttaaatcatctttaaattagttataatactgaatgcaatgtaaatactatgtaaattgctattatgttakagttttatttgtattgtttttattgtttattttttattgttgttttttgaatatttttgatccaaaattggttgactccatggatgtgtaaccatgaata

SEQ ID NO: 49496 - DNA, 201 bp, Homo sapiens
acctagatgctagcacaagacaaactgcaaatttacagaagcactaagttgtagaaagtgtaaaagtttagcatgaaaacattaacctttacagtgggatraacacaaagtctagcacagagaggaactcaatgaatgtgtgttgaatggatcatacatggcatatactgaggggtgagctccaaagaacactggggaatt

SEQ ID NO: 49497 - DNA, 201 bp, Homo sapiens
catacatagagatattctttcttcgggttacttcatatgcaaaaaagacctagatgctagcacaagacaaactgcaaatttacagaagcactaagttgtaraaagtgtaaaagtttagcatgaaaacattaacctttacagtgggatgaacacaaagtctagcacagagaggaactcaatgaatgtgtgttgaatggatca

SEQ ID NO: 49498 - DNA, 201 bp, Homo sapiens
aaacttagatattttgctcttagatttataacttgctctttggggatggagaaagcgaaggaattggcaaaggtttttttttttttttttttttttttttwaattaagcaaaagctaaagagatctctaacttcctcgaaagaagaaaagaggaagaaaacaaatgcatacatagagatattctttcttcgggttacttca

SEQ ID NO: 49499 - DNA, 201 bp, Homo sapiens
aacaaaaaaaaaaaaaaaatcttttcacagaaccagccttgttttattgatttttctctattgtttttctgttttcagtattaccgatacctgctccaatyttctgttttaaaaagttggctttttctgacattgctctgtcaggaaaaggggtagggcacagcctgtttactgccaagtgggggtcaaagtccaggttcc

SEQ ID NO: 49500 - DNA, 201 bp, Homo sapiens
gtttgatcacagagtacttgactgaatgcttattttggcctgtgtctctccctctttctcagatataacagtttgtgcccatgaccacatcagctggcatytgctgggaatgagctcggggccagaattattctccattcatttcaacggccaggtcctggagcagaaccatcataaggtctcagccatcacccttgtcag

SEQ ID NO: 49501 - DNA, 201 bp, Homo sapiens; identical to SEQ ID NO: 49118

SEQ ID NO: 49502 - DNA, 201 bp, Homo sapiens
gaaggcagcccctcgacagcactttgggtgacgttgtgtgaatctgcctcagatgcagacacagaagtccaaatggactggtttgattaagagcagggaaraaaagagggttcttattggtttttcacatgccagtaactcactaatacatctagagagtattaattgtattatattaatatcatattaattaattaatat

SEQ ID NO: 49503 - DNA, 201 bp, Homo sapiens
ttcccaaaagaataattgggggtaaatgggacaaggtagggaaagaccatcagtagaaactaagaatagtaaacatttgtaaaaaccctctgccttataargcagaataaattgaatacatatgataaatgctaacacagatatgttaattgctgaactcaatataagcatttctttggcatggataaacgcttccaccaa

SEQ ID NO: 49504 - DNA, 201 bp, Homo sapiens; identical to SEQ ID NO: 49120

SEQ ID NO: 49505 - DNA, 201 bp, Homo sapiens
taccatattgaacaatgcagttatagaccatttagaaaaacatctagaatgaggtataaactaataatacatcatgtaaattattaaagtcacttaagtgrtttaagtaggtatttaaatatttgttaatgccagtcattatactggtactaaggctaagagtggtaatcgaggtagacatgagccctgcccttgtagaaa

SEQ ID NO: 49506 - DNA, 201 bp, Homo sapiens
ggtcaggagttctgtcatgggacaaagcttgggagcatcttggtaacttcttgtacatcaagcagaggaagacggcacggagaccagatcattgtttgacmagagaaaaaaacacctgctatttcagggtgtggatccacctctgtttcttctcattcctccttcatctcagtccttaaggttctcccaggcaaattcctg

SEQ ID NO: 49507 - DNA, 201 bp, Homo sapiens; identical to SEQ ID NO: 49122

SEQ ID NO: 49508 - DNA, 201 bp, Homo sapiens; identical to SEQ ID NO: 49125

SEQ ID NO: 49509 - DNA, 201 bp, Homo sapiens
cctaataaatgagcactggatagaattgtcagaaggatttagaaacagtgggtggataaaattagactacaggctgctgaggaggcaacagaataaaaaayaagatttgatttcaagtatcttaactgtgaataaaactcaatactagttaacaagaatgcaacaaacaacaatgtaaattcacaatgttaataaaaataa

SEQ ID NO: 49510 - DNA, 201 bp, Homo sapiens; identical to SEQ ID NO: 49128

SEQ ID NO: 49511 - DNA, 201 bp, Homo sapiens
caacaacaaacaaacaggtatcacaatcagagatcaagaagggtgtaagatgatatttgatctgacatctgaagaatgagcacacatttacccagaaaaakaaagggaggaagaacttcaaaagttatctcctaccctgcaaagaatataatgttttgcccttaggggagcttgtgaaggcagtggaaagaatatcatttt

SEQ ID NO: 49512 - DNA, 201 bp, Homo sapiens
caatttattattatcatcattgttactgggataaagatcaatcagaggaaggaggattatgaatacaacagaattaggtgataaatatccaggcttattaygccattcatttataatcttcatcttcaaattcagagcctatcagaaagtttccttttctatatgatgagtgattatcagaagagcaaggaaattcctgag

SEQ ID NO: 49513 - DNA, 201 bp, Homo sapiens
ttcaactctgaccctgaagttcaagtgctttctcccactatctagcagaaaaaagtatcgttaaccatatagtctcacaaatactgaattacaaatggcgmtgagtgctgtcaaaaaaccaacaacaaacaaacaggtatcacaatcagagatcaagaagggtgtaagatgatatttgatctgacatctgaagaatgagca

SEQ ID NO: 49514 - DNA, 201 bp, Homo sapiens
ctagttctggtaatttctttcaaaatcttgtgtccagacccacgattataacttgcttttataacaaagtttacttccgccatttttgctaaccgctcacrttcaaaaacccagaaagaaccctgattctaaagtaagctattctagattttaaaatataatctactatacctgtgtaagcattcactacattttcagtga

SEQ ID NO: 49515 - DNA, 201 bp, Homo sapiens
ctgttctctccataactaaaatgtctctacctcttttatgcctgtgaaaacctctagctggttatactctgcatcactggtacaaccttgatatgaagacwcactaagataccacccagatgtcactagaggatgttatagacttaaaagttttctcatataatcattctaattcagttaatttgcttttaaaatacatat

SEQ ID NO: 49516 - DNA, 201 bp, Homo sapiens
tttagcctcaggagcatagaagtctaggctccccattcagcctttgctgttgtgggttggggaggggcctcaggtttttctgtggtgtttggctaaaggasagaagtcagtgtccaccagttttctatcatatctcgctatgctgccctttactggtactttggttagagaaagcagattttatttgggctttttcagtct

SEQ ID NO: 49517 - DNA, 201 bp, Homo sapiens
ttgcctgtttcatctctgatattgtcatctgcccctcctttcttttttgtgtgaatcttgctagagatttgtcgattttaaaaaaatcttcttggccgggygcagtggctcacgtctgtaatcccagcactttgggaggccgaggtgggcagatcacgaggtcaagagatcaagaccatcctgaccaacatggtgaaaccc

SEQ ID NO: 49518 - DNA, 201 bp, Homo sapiens
agaatggagcacaaaatatttactatacatttgacgaatgactaaatcaatgtaaatggaaggctttatctttttcctgagatttctcctttggctaattyaggagaataatctctcatttgaaaattctgagtttgatcttctagtcacatgttagactagataaagcttatcttggataatcactgctttgacacaacc

SEQ ID NO: 49519 - DNA, 201 bp, Homo sapiens; identical to SEQ ID NO: 49144

SEQ ID NO: 49520 - DNA, 201 bp, Homo sapiens
acatttgtactctggcatttagcacagagcctggaacctagtggatgatgatggtcatgatcatgatgatattaatcattactgaactaaactgaggggcygaggactgattagaaagtaaggactatgcattatttttcccttgctttaaaattattgattttgctgataattttgagcaggtactttgtcttacttatt

SEQ ID NO: 49521 - DNA, 201 bp, Homo sapiens
attttatcatcaaacaaaatacccagatttctcagactggccaatggtatacggcagagtagaacatctggtcttgcgcctcaaggagctcatgctaaaarttggctaccaagacttttgattttactattgtagtttgttttgttctttatttcagtgtacctgaagtaaatagtagtgttaatgctagtaagcctctga

SEQ ID NO: 49522 - DNA, 201 bp, Homo sapiens; identical to SEQ ID NO: 49153

SEQ ID NO: 49523 - DNA, 201 bp, Homo sapiens
ccactaagcaacacttttgttttttattctgttaagcgagatgaacgcactggtcatgtgcttagagtcacagcaatgtcaaattgctttagaaaaacaaragtttactaaatatttcattctcatttttctctccttgtgttattttgacccagtaatcaataggtcacagacaagcagtggtccacagcccatacttga

SEQ ID NO: 49524 - DNA, 201 bp, Homo sapiens
caaattcctgtttgagagtatgttctgatgtcatgcttgtatgatctgtaacatttacctcaaggccaaagtcttttagaaagtatacagtagcctatacyctgctgaaagagctcttggaaagaactttggctaacatgtttgacatatctgaggtttgggctggtaatttgctctataaacacgtgaaatgccagcttc

SEQ ID NO: 49525 - DNA, 201 bp, Homo sapiens
atttactctgtttttccaggaaaaagatattcactcaggcttgataggtcccctcctaatctgccaaaaaggaatactacataaggacagcaacatgcctrtggacatgagagaatttgtcttactatttatgacctttgatgaaaagaagagctggtactatgaaaagaagtcccgaagttcttggagactcacatcctc

SEQ ID NO: 49526 - DNA, 201 bp, Homo sapiens
cattttgagctaataggataaaaaattttctgggttgggcatgatggctcatgtctgcaatgccagcactttggaaggctgaggcaagaggattacttgaraggagtttaaggctgcagtgagccatgactgtgccactggactcaagcctgggcaacagaataagaccctgtctaaaaaaaaacaaaaacaaaaaacctt

SEQ ID NO: 49527 - DNA, 201 bp, Homo sapiens
acaaccaccaagatattttcaactctgaccctgaagttcaagtgctttctcccactatctagcagaaaaaagtatcgttaaccatatagtctcacaaataytgaattacaaatggcgatgagtgctgtcaaaaaaccaacaacaaacaaacaggtatcacaatcagagatcaagaagggtgtaagatgatatttgatctga

SEQ ID NO: 49528 - DNA, 201 bp, Homo sapiens
aataaaccaccccaaaacttagtgttaaaagagcaaccaaaaaaaatttatgtgagattatggatttgttacttagcttgatttaatcatcctgtaatgtrtacatatatcaaaatgttatgtataccataaatatataaaattttatcaacgaaattcataacaatctctcagaccacagagaaatcaaattagaactga

SEQ ID NO: 49529 - DNA, 201 bp, Homo sapiens
ttacaaatattttccagtcttcataacccatcaaaaaggataaagttatctctagaaaaaggattatattatcttaaattataaatgaaaaaactgaggtyaaagggacttcaagaaaccttcccaagttcccacagttagcaaatgatacaaccaccaagatattttcaactctgaccctgaagttcaagtgctttctcc

SEQ ID NO: 49530 - DNA, 201 bp, Homo sapiens
catataaatggagactaaaatctaaggaaatgatatcacaataggaaatcattttgttaccaaaataatgtataagcaacacatataaggaagagatactycatgagatcatttctgtttcttttcacacgagtagtcaaaattatatttgaagtaataaaaccatcatgatatccgtggaagatagagttcccaataata

SEQ ID NO: 49531 - DNA, 201 bp, Homo sapiens
tgcaggttagttacatatgtatacatgtgccatgctggtgcgctgcacccactaactcgtcatctagcattaggtatatctcccaatgctatccctccccbctcctttgggagatttttaggtaatgaggatggagccctcatgatgagattagtgcccttataaaagggaccctctcactcaccctctttctaccatgtg

SEQ ID NO: 49532 - DNA, 201 bp, Homo sapiens
ctaaacttaattaacatcattcatttaattatttgaaattcatcttatatgtaactgacaggcgaatgtgaaattctgagtaatttagtttgatcaattaracagacattaatttgtgtgactagagtaacctttcattatctatctcaaaatatcatgtacacaagtatatacaataattttttaagcccagtatgtgtt

SEQ ID NO: 49533 - DNA, 201 bp, Homo sapiens
aattatcagaaggtaagataaatctaatatttttctgaaaagggaaaatgtctaagtctttaataccagcatcaacatttaaaactatactgttaaccacrtgttgttagggaaatctcttgcaactggtaattataaaaattgttgctgttgtaagttttgagagaagaaaaggaaaaggttttggagtcctctagacct

SEQ ID NO: 49534 - DNA, 201 bp, Homo sapiens
cagagtattccctccttttctgtcataatatttaccataggtttaaattgaatgtttttgtgatcatttgtttaaaatctgtctttcctactataaaaacktataaagttatagaactataaaaatgtttgacttttataaactctatgaaggcagggagtgggtgtatctattttactcttttacgcaccattgcaattc

SEQ ID NO: 49535 - DNA, 201 bp, Homo sapiens
aaagtcctttcagatgattaaattttttagtgatttcctgatttaaccttgttagaggtagactctgacagttggtgagaacagtctccaatttatgtgtraggcctttgcacctttctgtcaacccctgtgtatctcagaatatatttgtttcatgtggacaaaggtgtttcgacgtccattttaatgtaatctcttcct

SEQ ID NO: 49536 - DNA, 201 bp, Homo sapiens
tttgtcgtctatgttcatgagaggatattggtatatagttttatttttttaattgtctttttctgtttttgataccacagttatactagctttcataaaaytggtaagcatgctcttttctacattctaggagaaaatgtctgcaattggtaataattctttaaatatttggtaggaatcactagtgaaaccatctgggcc

SEQ ID NO: 49537 - DNA, 201 bp, Homo sapiens
aaatgatctcaacccgtccctctccaaaaattcacctgcctggtttctgaaatttcacagcagttcctctaacttaagaaggaggaaacaaagcacttccytcactttggtttcagttaaacgtttggtaacactaaactttatctttacagttttgtgttacatttttaaggtgatcaagtttctcaggaactttttaaa

SEQ ID NO: 49538 - DNA, 201 bp, Homo sapiens
tgctcaaagagacctctggccaaactggcaagcagttaaagttttctttcagggccttcctctctatggcctcaacttcctcctctctcttcttccagcarcttcccctttcatcattcctttccctggggacttggcattcagtgatcctgtagatattgcacaactggggaacctttagacatccttaaaatcacatga

SEQ ID NO: 49539 - DNA, 201 bp, Homo sapiens
ctttttgttttaggatgaacttttaatacacgttatactatgtctctgctgtacaaagtggtttttcattttacttagaaatgctccatttcacttagacraggcgtggtggctcacacctgtaatcccagcactttgggaggctgaggcgggtgtatcacctgaggtcaggagtttgagaccagcctggccaacatggtg

SEQ ID NO: 49540 - DNA, 201 bp, Homo sapiens
ggggccggtatttgaaggtgtaccttttgtggcttttgccaagctaagcaaattttaatccctttgctgtgtgagacattgtgctaaatgccataagagayggaaaggactaattccaggctgaagacttttaaacaataaaaaggcatggatagcttttgaagaaaagggttctgtgatcaaagtcctttcagatgatta

SEQ ID NO: 49541 - DNA, 201 bp, Homo sapiens
cctattactagaatattaccaacttttagattggaaatattcaactctaagaactctgatgtgacaaaggcataatttgtagccataattgcttttattcyggcccatggtctgattgcattgaaaacacatcagtcagatcaaaagcattcctgtcaattgggaaacctgtgtaaagcatccttcttcatgacttgtgat

SEQ ID NO: 49542 - DNA, 201 bp, Homo sapiens
tcaatgtatattttatactcacagcatatctcagtccagtctacccatatttcaagtgctcgataaccacttgtagccagtggctaccatattgaacaatrcagttatagaccatttagaaaaacatctagaatgaggtataaactaataatacatcatgtaaattattaaagtcacttaagtgatttaagtaggtattta

SEQ ID NO: 49543 - DNA, 201 bp, Homo sapiens
tgagttgggattcaaatttaggtactctgtgcccaaatatgaattgcatgtagtcattgtatcagtttgctaagatcttatgtgctagctctttagttctraagaaagctgattgtataatgaatttaggcagtgtgtgacttgttgacaaggacagttctgtttactggctttcctatattgcaggtggacatgcaaaag

SEQ ID NO: 49544 - DNA, 201 bp, Homo sapiens; identical to SEQ ID NO: 49206

SEQ ID NO: 49545 - DNA, 201 bp, Homo sapiens
ttttcactgggttcttactctttaatgtttgggagggcaagttatctaatttctctgaattctcatatgttcatcttaaaatgggaataataatacatacrttgaaagatggtttaaggcgggggtcagtaaatttttccgtaaagggccagatagtaagtttgtttggctttgcaggccataagatctctgttgcaagta

SEQ ID NO: 49546 - DNA, 201 bp, Homo sapiens; identical to SEQ ID NO: 49209

SEQ ID NO: 49547 - DNA, 201 bp, Homo sapiens
tgtgtgtcttttctaaaataagaatgacgctaacagttttagctctcagcagctaccaggtggcacccaaagcatatgagaacaaaatgagataagaaacyaggtacccaggtaataggagaatagtggcaagagagcatttgggtggtcacactgggaaaagtgtgcctatttggaaattcacaaggaaaatttgccctg

SEQ ID NO: 49548 - DNA, 201 bp, Homo sapiens; identical to SEQ ID NO: 49210

SEQ ID NO: 49549 - DNA, 201 bp, Homo sapiens; identical to SEQ ID NO: 49212

SEQ ID NO: 49550 - DNA, 201 bp, Homo sapiens
tacttgggaggttgaggtaggagaattgcttgaacccaggaggcggaggttgcagtgggtcctgagattgcatcactgcactccagcctaggagacagagygagactccatctcaaaaaaaaaaagaaaaatgctccagtgatgtcccatttcacttagaagaaaattcaagttcttaccgtagcccatagggcctccctt

SEQ ID NO: 49551 - DNA, 201 bp, Homo sapiens; identical to SEQ ID NO: 49214

SEQ ID NO: 49552 - DNA, 201 bp, Homo sapiens; identical to SEQ ID NO: 49215

SEQ ID NO: 49553 - DNA, 201 bp, Homo sapiens; identical to SEQ ID NO: 49217

SEQ ID NO: 49554 - DNA, 201 bp, Homo sapiens
cattttattcttgattcatccctttcttaatatattttaaaatagtgagcaactatctgtgctgaaagaccttttttcccctctaatctccactaagcaayacttttgttttttattctgttaagcgagatgaacgcactggtcatgtgcttagagtcacagcaatgtcaaattgctttagaaaaacaaaagtttactaaa

SEQ ID NO: 49555 - DNA, 201 bp, Homo sapiens
aatagcttcacttactaaaacacaaatattgttaagagttgagatctgggtagtgtttttaaattgtattctatttcatttgactacattttccacttggktttctgaaaatatactcatatgactctcaatgttgatcccaagttccaatactaggagcttgtaaaaactggggcttagttaactgacctcgaccttaga

SEQ ID NO: 49556 - DNA, 201 bp, Homo sapiens
agaaggaaatattttctctttttttttttaaacaggaaatagaagagacaaattagaagctagagaagaaatgtgcagccttgttaggtatagtgacctgrgtaggtttcaccttggcctgtactttgaataagaccttaaggtatcagctcagccactctctccgagttctgcagttcctctatatgatgaccatggctt

SEQ ID NO: 49557 - DNA, 201 bp, Homo sapiens
ggtacatgtgcacattgtgcaggttagttacatatgtatacatgtgccatgctggtgcgctgcacccactaactcgtcatctagcattaggtatatctccmaatgctatccctcccccctcctttgggagatttttaggtaatgaggatggagccctcatgatgagattagtgcccttataaaagggaccctctcactcac

SEQ ID NO: 49558 - DNA, 201 bp, Homo sapiens
actcatcacgttctgctacatgtgctggcccagtacactgcagtctctttcctatactgcctaatctctctgcttccattcttgtccctacacagactatyctctacacagcagctatgatgaactttttgttttaggatgaacttttaatacacgttatactatgtctctgctgtacaaagtggtttttcattttactta

SEQ ID NO: 49559 - DNA, 201 bp, Homo sapiens; identical to SEQ ID NO: 49225

SEQ ID NO: 49560 - DNA, 201 bp, Homo sapiens
taggagactgtgaatcctaagggataagatagaacaaaatccttttgagctctgtgcttttttgcataacttggtctaaaaaaaaagcaaaggttttaacmtcttccttatctatgtgtttttgtcattttcataggcaaacaacaataagcagtggctagaaattgatctactcaagatcaagaagataacggcaattat

SEQ ID NO: 49561 - DNA, 201 bp, Homo sapiens
taagatacctacactccaatttcctggctttctatagaattccagggcctatccttaaattaggccactagaaaggaaaaaagaattgtggtgctggtggsgtaaatagaaaagattggattccacacagtcttgggaactgatatctgtgtcttgaaactcattctggcccaatatggaatcacagaatgttacagtagc

SEQ ID NO: 49562 - DNA, 201 bp, Homo sapiens
aatctgaagactgtgctataatgagaataacagtattttgcatttgacaaatatgcagtgacatgtaccacctctttaagtcttctaaatcttagttcttmaggtgcctggtctcagacaaactcctggttgtctgttttggtttgttttatttctcactacaccaggttgccctcataggaggataaatatcattgtcat

SEQ ID NO: 49563 - DNA, 201 bp, Homo sapiens
tcttactgttccttagatacatcaagactactcctgcctcagagccagagagctgtgtgatttggttcctcaattcatctaggtctctgagcacacccatktcagagaaatctaaagtaactaccctctcgcatcaccctctgtaattgaaatgaacatctttcttaagcaaagaaagttattgctaaggaatgacagtgg

SEQ ID NO: 49564 - DNA, 201 bp, Homo sapiens
aataattgttcaggtaccctggaaaattaacttgctaaactttaatttacaaataacatttgttattcttaagatcaccatgttatcaaagcctttgtaastacatgagcatagaaatgggcatatgtgaatctttccaaataataaaagttcactattgaaggacatatgcatctccagagaactcatcttagctatccc

SEQ ID NO: 49565 - DNA, 201 bp, Homo sapiens
gattttattatgccctctgcattaaaataaaacatctcctcctccatgtctgacactcaccctcacctatagcctccctctgtggtttgagctattttttkgggagtggggataaactaactgcatgctgagccagttacatgagaatccagattcctctatctcagaggtagatatttgagagataggtggtagggggtt

SEQ ID NO: 49566 - DNA, 201 bp, Homo sapiens
ctgtgtgcctcatctttctcatctgtaaaatggtaataataatcatgtctctgtcatacaggtttgttgtcgtgaaatcttagaataatgactggcatatracagataataaatattagccatgatagtaaagataattcttcaattaaaatgtgttcaaataatttagtatttatcttaaaacttgttagtttcagaaaa

SEQ ID NO: 49567 - DNA, 201 bp, Homo sapiens
tttgcaggccataagatctctgttgcaagtactcaactctgccttttagtacaaaagcagccatagacgatacctatttttttggctttggttacagatgycagaactaattaactttgttaccgtattctttccctcaagtcatacaccagagtaagaccgcctctgacaatacaattttatttacaaaaacaggaaatt

SEQ ID NO: 49568 - DNA, 201 bp, Homo sapiens
aatatgactgtgcctagagtcagagacatggattaaaatctactcgctaaggggcacctccaatcctcacttccagtccaaagacttggtgatgaaatccrtgggtgacatcatagcaacatttttaagcaagaggtcaaaggctcacatccttagaaatgcgtttgatcttctattccaagcgtgtgtgtgtgtgtgtgt

SEQ ID NO: 49569 - DNA, 201 bp, Homo sapiens
tgaaattaatatatggctacctagaaaattcagggagggtagggaggtcattttgagagtcatcagagaaaagtgagagttttcactgtaataaaaattaygtgaatgtattttctattaaaaacaattaaactaggaaaaagaacaaaaaaaatttggccaagattatagaattgttgacagaactgagataggaatcca

SEQ ID NO: 49570 - DNA, 201 bp, Homo sapiens
ggtcatccttgacttctgtctctcacaagccacatgcaatccatcagcaagtcttgtttgccttacctacaaaaatgtccagactccaaccactactcatyacgttctgctacatgtgctggcccagtacactgcagtctctttcctatactgcctaatctctctgcttccattcttgtccctacacagactattctctac

SEQ ID NO: 49571 - DNA, 201 bp, Homo sapiens
gggcactgaggagagggttagaagggttttaggccatctggctgttggaggagctaaagagcagcttgaaaaccatttagccatgtgttttcctacatgcrtgaaagtatttggtatgcatttatgaaaacatccttttgttttgccttaaatctgaagaagcaggaggggaggttgaataaatactccaaactgtccact

SEQ ID NO: 49572 - DNA, 201 bp, Homo sapiens
gcactaaattgggtacatgctgtgctggcttccccaagccctgaagtaggccactcctttccccaatccagctttgggcactgaggagagggttagaaggkttttaggccatctggctgttggaggagctaaagagcagcttgaaaaccatttagccatgtgttttcctacatgcgtgaaagtatttggtatgcatttatg

SEQ ID NO: 49573 - DNA, 201 bp, Homo sapiens
tggctacataatatgtggggcccagtgcaaaatgaaaatgtgagtccccttgttcatattattgaaaatttcacagtgactgcaaagcattaaaccaagcyaggggccctttggggcatggggccctgtgaaactgcccaggtcacatacccatgaagctggctctgtttttaaccttgattaaaataactaaataaaact

SEQ ID NO: 49574 - DNA, 201 bp, Homo sapiens
gaggaaaagggtgagagagtaggactaatggaaggtgttatagtccatgtcaatagtatcctagactgagttcagggtgaatatatggctaggacagaaasaaggcaagtaatccaaagatggattgacacatcaaagtagagcaaaatgagtatagggacccaagagtcttggaaaggcatgcatgaagacatttcaagt

SEQ ID NO: 49575 - DNA, 201 bp, Homo sapiens
tgatatctgtgtcttgaaactcattctggcccaatatggaatcacagaatgttacagtagcaaggagcaaagcatctggtctagatttttccttttaattstaaatacacaggagattaaataattttagcttagtttggtagcagaatcaggactagaatcccattctcccagtaaacaggccatgctccttccaccatt

SEQ ID NO: 49576 - DNA, 201 bp, Homo sapiens
aagcttgtttcatggagaatttaatattattcttttcttttagttatattctcatattttaaatatatgagttgcatatgaatgtgatgtcacaaaattasttctataatatatagccatctgctggtaagccagctctccaaataaaacacgttttctgccagacattgttcgttgtatctaagtgttgccaaattctct

SEQ ID NO: 49577 - DNA, 201 bp, Homo sapiens
gtaaaaatgcttgtaaggacatttcctttaataatgtatttaataagactgtcttagatcagggaataaagtatctgcaactgtaactaatcacttaaaarctgtcactaaagggtttcaatttgaggttaaattttcagaaactctgtaactagcatgcatcaaattgacttcaatgctgcacctttgagcaaagtttgt

SEQ ID NO: 49578 - DNA, 201 bp, Homo sapiens
ttccagattgacagtgtgttctaattgtagccctagaagaaatctagaggtcaaacctatcacaattagggcaccaacatgtaccctagagttaactaggyagagcccctcaggggcccaggccctgtcttctttacatttgtactctggcatttagcacagagcctggaacctagtggatgatgatggtcatgatcatga

SEQ ID NO: 49579 - DNA, 201 bp, Homo sapiens
tttattggccttttaccccatcatgtaaaacatttcaggcttttttccccagatccttgttgtctgcctacatccacactgatgttctcaccttcttctcktaaagaatttatcaagttattgtaccaaacaaaaataactgcatcccaaagagaaattctgtcaccagctgatgatagggaatctttcacctaattaaat

SEQ ID NO: 49580 - DNA, 201 bp, Homo sapiens
tatgttcatcttaaaatgggaataataatacatacattgaaagatggtttaaggcgggggtcagtaaatttttccgtaaagggccagatagtaagtttgtytggctttgcaggccataagatctctgttgcaagtactcaactctgccttttagtacaaaagcagccatagacgatacctatttttttggctttggttaca

SEQ ID NO: 49581 - DNA, 201 bp, Homo sapiens
ctaaaaggatttcagcaggagaaatatttgtcctttagaaagattatgttgtccaattatagagaatagattggagaaagaccagtccagagccagagaargtagtcatgggactgttgtatcaatccagatagcagagaagctgagatggagtccaaagatatttaggagctaaagttgattaaacttggtgactcatta

SEQ ID NO: 49582 - DNA, 201 bp, Homo sapiens
ggctggagagcagtggcaccattttagatcactgcaacctctgcctcctgggttcaagtgattctcctgcctcagtctcttgagtagctgggattacaggygcccgccaccacccccatgtaatttttgtattttttagtagagacagggtttcaccatgttggctaggctggtctcgaactcctgacctaaggtgttcca

SEQ ID NO: 49583 - DNA, 201 bp, Homo sapiens
acatgttatccaggttccaagtagaatatttaaagaattcaattgaacaatgagaacatttagacacaggatggggaacatcacacaccggggcctgtcgsggggggggggtggggggcggggggagggatagcattaggagatatacctaatgttaatgacaagttaatgggtgcagcacaccaacatgacacatgtata

SEQ ID NO: 49584 - DNA, 201 bp, Homo sapiens
ttgaaattcatcttatatgtaactgacaggcgaatgtgaaattctgagtaatttagtttgatcaattagacagacattaatttgtgtgactagagtaaccyttcattatctatctcaaaatatcatgtacacaagtatatacaataattttttaagcccagtatgtgttaaaataaatctaggtgtgaaacattgattgtt

SEQ ID NO: 49585 - DNA, 201 bp, Homo sapiens
tcttgatttctgcacccataacctcctgtctctgctgtgttctcccattgcagtaactaataacatcatttacccagttgttctgataaaacaccttgagktcatccttgacttctgtctctcacaagccacatgcaatccatcagcaagtcttgtttgccttacctacaaaaatgtccagactccaaccactactcatca

SEQ ID NO: 49586 - DNA, 201 bp, Homo sapiens
agaggtcaagctttaattattcaggctaaacaaataattgaacagcttgcatggacttttttcagtgggtttaactgacctaattatgtttttctcagggrtagggactattggcattagtttacatcctgagcccacaggcctagtataggattcagaaattatcaaactatccacaaatttgaagatttaaataaaatc

SEQ ID NO: 49587 - DNA, 201 bp, Homo sapiens
tcaaacattccccattcaagaccctgatcaaatgcactctacttcagaccccagtcacagatcctcttctccagagctcagtgaaatgcttgagtatgacygaagtcacaagtccttccccacagatataagtcaaatgtccccttcctcagaacatgaagtctggcagacagtcatctctccagacctcagccaggtgac

SEQ ID NO: 49588 - DNA, 201 bp, Homo sapiens
gccttgtgggatggaatcagactgtgaaaacttttggagatgatttaacctaggtcatctgatattagatgtgtatgaaggcaacctgtgcagaactccaragaagagaggactgggataaggatcaataaaaaccaggataaataagagctttatgctcaaattcagggcccagttaagctttctctgacatacctactc

SEQ ID NO: 49589 - DNA, 201 bp, Homo sapiens
agacactatgagcctattaagcctaacagattacaccctgagtagtaaagaaaaagacaattagatgagtagccttgtgggatggaatcagactgtgaaarcttttggagatgatttaacctaggtcatctgatattagatgtgtatgaaggcaacctgtgcagaactccaaagaagagaggactgggataaggatcaata

SEQ ID NO: 49590 - DNA, 201 bp, Homo sapiens
agcaataaatctaaggcttggctgatccaggccccacttggctgctgaagggctggaggtgggaagagggatcaataaataggtgcactagaaacctgccrtggcacacctgtcaggagttgcagtacttccctttgggtggagagaagccaccatgattcacaatggagaaagtagctgaaacctggaatcagtttcctg

SEQ ID NO: 49591 - DNA, 201 bp, Homo sapiens
ctctgcgtggtgaggaaaagggtgagagagtaggactaatggaaggtgttatagtccatgtcaatagtatcctagactgagttcagggtgaatatatggcyaggacagaaagaaggcaagtaatccaaagatggattgacacatcaaagtagagcaaaatgagtatagggacccaagagtcttggaaaggcatgcatgaag

SEQ ID NO: 49592 - DNA, 201 bp, Homo sapiens
atatggctacctagaaaattcagggagggtagggaggtcattttgagagtcatcagagaaaagtgagagttttcactgtaataaaaattatgtgaatgtaytttctattaaaaacaattaaactaggaaaaagaacaaaaaaaatttggccaagattatagaattgttgacagaactgagataggaatccaggagtgtttg

SEQ ID NO: 49593 - DNA, 201 bp, Homo sapiens
ttttgagttaatttttgtatatgatgaatccagtttcattggattcattggggttcagtttcattcttccacatatgggtagccggctattccagcaccayttattaaatatgagtccttttccccttgttttttgttgttgttgttgctgttgttgttgactttgtcaaagttcaggtggttgtaagtgtgtggctttat

SEQ ID NO: 49594 - DNA, 201 bp, Homo sapiens
ggaggataaatatcattgtcataaaaaaaagagtgattttatttctggtgtgtgtaaaccttggggaacttgctgatgatggaagggggaaagttatacamtttagttgaggatataaggtacatgccaacaagaataaataaattaaaatgcatggtcacattttaaatgttagcaatagtcaaacatttattggtggcc

SEQ ID NO: 49595 - DNA, 201 bp, Homo sapiens
ggtgacgttgtgtgaatctgcctcagatgcagacacagaagtccaaatggactggtttgattaagagcagggaaaaaaagagggttcttattggtttttcmcatgccagtaactcactaatacatctagagagtattaattgtattatattaatatcatattaattaattaatataataattaatagataatttattgtat

SEQ ID NO: 49596 - DNA, 201 bp, Homo sapiens
gaaagaccatcagtagaaactaagaatagtaaacatttgtaaaaaccctctgccttataaagcagaataaattgaatacatatgataaatgctaacacagrtatgttaattgctgaactcaatataagcatttctttggcatggataaacgcttccaccaaagcctcctagtgatgcaaggaatcctggctttgttgcaat

SEQ ID NO: 49597 - DNA, 201 bp, Homo sapiens
tgtaaaatcaaagatacaacaaacctgttttattctagactaaaggtaaaataatttgaagtgaaaagaataaaagcattgataaaattacaccccaattktctcattagccatctcactcagtgtaattatagaatatatcctatgtacaagtctatatcattcactgtttcaagatgctcataattcaacttttagtag

SEQ ID NO: 49598 - DNA, 201 bp, Homo sapiens
tgatagtgtggtttcatatttgccagcattatgaataatcttctctgcactcctagcagctagaattttaaataaaaagttatcatatttcttcaggtggmaaaataattgtgaaacacaatgttcttggcagaaaataaaacccaaatgactaaatacaacatatttttaggcatgtgtgaatgaatatatttctctctc

SEQ ID NO: 49599 - DNA, 201 bp, Homo sapiens
gccagctctccaaataaaacacgttttctgccagacattgttcgttgtatctaagtgttgccaaattctctatacaaaaatttgctcttctagatttttcyaaaacattccaatgcttgacttaatgtaggtgattacattttttcacttctcatctgaatattttggccttatgtagagacttccttgagtatatgataa

SEQ ID NO: 49600 - DNA, 201 bp, Homo sapiens
gggtgcctctttagcctcaggagcatagaagtctaggctccccattcagcctttgctgttgtgggttggggaggggcctcaggtttttctgtggtgtttgrctaaaggagagaagtcagtgtccaccagttttctatcatatctcgctatgctgccctttactggtactttggttagagaaagcagattttatttgggctt

SEQ ID NO: 49601 - DNA, 201 bp, Homo sapiens
ctctttagacttgttcatggtataaccttgtcactccatacttcattttacaatcttttaaaaaaatttgcactctctataatttgctcttagtctttgtsatataacaagggcctcaaagataaaatgctaatttttaatggtgtcatttcaaagttagaattcgggatcagaaatatgtgttttacttaacccccttcc

SEQ ID NO: 49602 - DNA, 201 bp, Homo sapiens
agataaactgcgggtatgcgaaggcagacagattggtataatggacattggagactcaaaagggaacgggggatggatgaaaagctacctattgggtacarggtacactactcaggtgacaggtacactaaaatcctagacttcaccactatacaattcatccatgtaaccaaaaaccacttgcattcctaaagcaactga

SEQ ID NO: 49603 - DNA, 201 bp, Homo sapiens
tgaaaagaagagctggtactatgaaaagaagtcccgaagttcttggagactcacatcctcagaaatgaaaaaatcccatgagtttcacggtattttcctcrgactttgatctaatctcctaattaaatcacactgggtcacagtgatttctgcccttagatattcacaagattagacatgagatgcttctgagacacccag

SEQ ID NO: 49604 - DNA, 201 bp, Homo sapiens; identical to SEQ ID NO: 8588

SEQ ID NO: 49605 - DNA, 201 bp, Homo sapiens
taaagtaactaccctctcgcatcaccctctgtaattgaaatgaacatctttcttaagcaaagaaagttattgctaaggaatgacagtgggtcaaagtgggmaagacttggccagaactatttctcctactctgttgacttcttttgggtccaggacaagtgtttctaccattctattgtgatctgtgtacatgtaatgttg

SEQ ID NO: 49606 - DNA, 201 bp, Homo sapiens; identical to SEQ ID NO: 48964

SEQ ID NO: 49607 - DNA, 201 bp, Homo sapiens
acagaagatggcatttatttgaaattttcttgaacaagtattagctatgttctgctctttctttatgaaaagaactgcaaagtcaagactcctttatctgwcattctgcaatgtatatatacttcaaaacaatatgtcatacacagtatatgcatacaattttatctgtcaattaaaaagagaaacaactcctccatttca

SEQ ID NO: 49608 - DNA, 201 bp, Homo sapiens
ttgaatgattggccatgaattagaatgcctacatttacagaagatggcatttatttgaaattttcttgaacaagtattagctatgttctgctctttctttrtgaaaagaactgcaaagtcaagactcctttatctgacattctgcaatgtatatatacttcaaaacaatatgtcatacacagtatatgcatacaattttat

SEQ ID NO: 49609 - DNA, 201 bp, Homo sapiens
caggcaacatgtaacctttggggactggtattttttcactcagtataattctctggagattcatctggttattgcatgtattccattatatgggtgtaccmcagtttttttgttgttgttgttttatacacatttatggtgtaaacatgatgttttaatatatttataaattgtgaattggctaaatcaagctaattaacc

SEQ ID NO: 49610 - DNA, 201 bp, Homo sapiens
ggcagaattccaaggagtctgtatttttaacaagcagccttccttctattttgccttctattaaaagtaatggcaaaaaccgcaattatagtttgcaccarcctaacacatgctgcctgaggagttagtgaaggcagcccctcgacagcactttgggtgacgttgtgtgaatctgcctcagatgcagacacagaagtccaa

SEQ ID NO: 49611 - DNA, 201 bp, Homo sapiens
tattggagactcaccaagaaatctttgatgttccagcaatgcatgccatttcagagattcaaaattgtcctcgtgaattattacttagaaacatctaaatrtctcttatttgtggggatagagctcatcaccatccctttaattctaagacaagatgtgctgttaggatatttatgatattaaaagtccattttattcttg

SEQ ID NO: 49612 - DNA, 201 bp, Homo sapiens
aatgagttctacaaaagagagtgctgagtgatacagtagatggcatccttgataaaattcttataaccagcataatagattaaaagttgcataaaataatrgattaaaagttgcattaaaatatttctcattatagctaagatataacagtaaacacaattgaatagaaacaatttttactcattttttaatgtagtctag

SEQ ID NO: 49613 - DNA, 201 bp, Homo sapiens
catagacgatacctatttttttggctttggttacagatgccagaactaattaactttgttaccgtattctttccctcaagtcatacaccagagtaagaccrcctctgacaatacaattttatttacaaaaacaggaaattggttgggtttggcccatgagccactgacatagtgacatagaactagcctgatataggcttc

SEQ ID NO: 49614 - DNA, 201 bp, Homo sapiens
cactaaattgggtacatgctgtgctggcttccccaagccctgaagtaggccactcctttccccaatccagctttgggcactgaggagagggttagaagggytttaggccatctggctgttggaggagctaaagagcagcttgaaaaccatttagccatgtgttttcctacatgcgtgaaagtatttggtatgcatttatga

SEQ ID NO: 49615 - DNA, 201 bp, Homo sapiens; identical to SEQ ID NO: 48973

SEQ ID NO: 49616 - DNA, 201 bp, Homo sapiens; identical to SEQ ID NO: 48975

SEQ ID NO: 49617 - DNA, 201 bp, Homo sapiens
caacaagaataaataaattaaaatgcatggtcacattttaaatgttagcaatagtcaaacatttattggtggccacttcctggcacttactatgcacttaygttgacatacatttttaaatatttacaatgacttctgtgaggtaaaatgttattatccttattttgccaatgaggaaatgaagaatcagagaataagtaa

SEQ ID NO: 49618 - DNA, 201 bp, Homo sapiens
gccaatcagagtgccgacagcatctctgtgaagaaagtgcctggattatatagacacatcacaactctccaaggaagggctctaatttggaattacctccrtcagcccattttcaataagacctacctgagattcaaactaggcctgactcttccaaagtcctcaggtcactcaaacttcaatgtcatgacagtatctggc

SEQ ID NO: 49619 - DNA, 201 bp, Homo sapiens
taaagataattcttcaattaaaatgtgttcaaataatttagtatttatcttaaaacttgttagtttcagaaaaaatcagaaagtaatttttaaatttattrttttctatataaactgttgtcaaactcatacccactaaggtataagtgactgataataggtcaatgaactaccttccttaggagtacttgcattagcact

SEQ ID NO: 49620 - DNA, 201 bp, Homo sapiens; identical to SEQ ID NO: 48978

SEQ ID NO: 49621 - DNA, 201 bp, Homo sapiens; identical to SEQ ID NO: 8611

SEQ ID NO: 49622 - DNA, 201 bp, Homo sapiens; identical to SEQ ID NO: 8612

SEQ ID NO: 49623 - DNA, 201 bp, Homo sapiens; identical to SEQ ID NO: 8617

SEQ ID NO: 49624 - DNA, 201 bp, Homo sapiens; identical to SEQ ID NO: 8618

SEQ ID NO: 49625 - DNA, 201 bp, Homo sapiens; identical to SEQ ID NO: 8621

SEQ ID NO: 49626 - DNA, 201 bp, Homo sapiens; identical to SEQ ID NO: 8573

SEQ ID NO: 49627 - DNA, 201 bp, Homo sapiens; identical to SEQ ID NO: 48989

SEQ ID NO: 49628 - DNA, 201 bp, Homo sapiens; identical to SEQ ID NO: 48990

SEQ ID NO: 49629 - DNA, 201 bp, Homo sapiens
tattttgaaataaaaaagatacccactttttatttctctctctgaactcacttagatgaaattacaagtttgactacatagtacgtctccagtgacataawccactgtttgttacaactgggtgctttggaaagaagttaaatgactcacggtagaatcatgacttaagagaaaccaacagataaaattctaaacattatt

SEQ ID NO: 49630 - DNA, 201 bp, Homo sapiens
caataatatgtttgggctattatctaatgctgtgtagaaatattaaaacccctcttattttgaaataaaaaagatacccactttttatttctctctctgawctcacttagatgaaattacaagtttgactacatagtacgtctccagtgacataatccactgtttgttacaactgggtgctttggaaagaagttaaatgac

SEQ ID NO: 49631 - DNA, 201 bp, Homo sapiens
aattgataatgactattaattgatctggaaaatacttgtttggggatcaataatatgtttgggctattatctaatgctgtgtagaaatattaaaacccctsttattttgaaataaaaaagatacccactttttatttctctctctgaactcacttagatgaaattacaagtttgactacatagtacgtctccagtgacata

SEQ ID NO: 49632 - DNA, 201 bp, Homo sapiens; identical to SEQ ID NO: 8589

SEQ ID NO: 49633 - DNA, 201 bp, Homo sapiens; identical to SEQ ID NO: 8591

SEQ ID NO: 49634 - DNA, 201 bp, Homo sapiens
aaaagatgaatttcttatattatgcttttcctccaagtggaattattagaatatctttaaaggcagagaatggagcacaaaatatttactatacatttgaygaatgactaaatcaatgtaaatggaaggctttatctttttcctgagatttctcctttggctaatttaggagaataatctctcatttgaaaattctgagtt

SEQ ID NO: 49635 - DNA, 201 bp, Homo sapiens
cagaaaattactctcagctttctttgcataacttccttttggcagtgaatctatcatagttctagaccagtgctgtccaatagaaactacgtatgagctayatgcgtaatttaaaattttctgatagcaacattaaaaagtaaagagaaataggtgacattaattttagtaatatgttttacttaactcagtatatcctga

SEQ ID NO: 49636 - DNA, 201 bp, Homo sapiens
gtgaggacagtggacccacccatgatgaccctccatgcctcacacacatctattactcccatgaaaatctgatcgaggatttcaactcggggctgattggscccctgcttatctgtaaaaaaggtaagaacacccccaccaaaagattcaacaactaaatgttggaatggtcaggagttctgtcatgggacaaagcttggg

SEQ ID NO: 49637 - DNA, 201 bp, Homo sapiens
aatagtggcaagagagcatttgggtggtcacactgggaaaagtgtgcctatttggaaattcacaaggaaaatttgccctgtaagctagtaactgaaacagraactgagaagagaaaggtacgagcttgtgttatgaatatgtagataggtgttctcacgcctgatataatttgaaggatgcccaaatgatctcaacccgtc

SEQ ID NO: 49638 - DNA, 201 bp, Homo sapiens
tataatcagatatatttaagtcagggccacacaaggtaggtaaaaatatctaattattgagtcagaaacataatccctaaccatggagttttactttattrtatatattttctaagcaaaaattattcattttttttctgtttttcatagactgtaggatgccaatgggactaagcactggtatcatatctgattcacaga

SEQ ID NO: 49639 - DNA, 201 bp, Homo sapiens
tccagggcattgtcatctgaacccacttagactttgtatatagcacctgttgtctccagatttgtagtgtggatgcccatgtgcatgtctgtttcagcagkagcttaaaagcttcttatgaacaagaatcaagcttctttcatcttcacatctccactacctatcactctcatttcattagtagataatgtcagtacttta

SEQ ID NO: 49640 - DNA, 201 bp, Homo sapiens
acacgccccaacgcctggctaatttttgtatttttttgtagagatgaggtttcaccatgttgcccaggctggtcttgaactcctgagctcaagtgatccamctgcttcagcctcccaaagtgctggggttacaggtttgagccactgaacctagctgagaagatgacttcaaagacagtgtcctaaaaaatctaccgggca

SEQ ID NO: 49641 - DNA, 201 bp, Homo sapiens
gatacttgtacagagtcttgagagtcaccaaatgttttcttcccaagctggatgaaataaagcctgttccccaaagcaagaaggtatcaaagaagacagtrtggcaccagattttaaataaccctagaaccattattacttgataaatatgctattttaaaaaataagaatttcttcaagttgaaatcattatggttgatt

SEQ ID NO: 49642 - DNA, 201 bp, Homo sapiens; identical to SEQ ID NO: 49006

SEQ ID NO: 49643 - DNA, 201 bp, Homo sapiens
gccccctttcatatacaaataagatgacagcattaaacttggggcatgatgcttttaccaactgagctaacgtatctatatactcttctattgagactggrggaaatggatacttgtacagagtcttgagagtcaccaaatgttttcttcccaagctggatgaaataaagcctgttccccaaagcaagaaggtatcaaaga

SEQ ID NO: 49644 - DNA, 201 bp, Homo sapiens
gataatgctgttcagccaaatagcagttatacctacgtatggcatgccactgagcgatcagggccagaaagtcctggctctgcctgtcgggcttgggcctrctactcagctgtgaacccagtaggtactttcattgaaagtttttctcattcccctaacctcgtaatctgaagtccaccaaatggaagagtcggggttatt

SEQ ID NO: 49645 - DNA, 201 bp, Homo sapiens
tagtgagaatggattaatgctgatacttccacccaattatctaatgccccctttcatatacaaataagatgacagcattaaacttggggcatgatgctttyaccaactgagctaacgtatctatatactcttctattgagactgggggaaatggatacttgtacagagtcttgagagtcaccaaatgttttcttcccaagc

SEQ ID NO: 49646 - DNA, 201 bp, Homo sapiens
ctacagccagcaattatttatgagcaattgcttaaaatgctcccacagctttcactggagacatgattattggcatataatattgcctctggtcctatgamtctaagaaaggtaaatacatattggtagggaaagtaaaattttaccttggaaatgagatgcaaacctagtaagcagatagtatcttttatggtaaaagac

SEQ ID NO: 49647 - DNA, 201 bp, Homo sapiens
ttttcaagaatattctcccattccaaaggttgtctcttcactctgttatttcctttgctgtgcataaacttttgagtttgatggcaatcccatttgtctayttctgcttttgttgcctgtactttcgaggtcaaatccaaaaaatctttgtccacaccaatgtcaagaagcttaagaataatggacattagcaaaaaacaa

SEQ ID NO: 49648 - DNA, 201 bp, Homo sapiens
ctccagcctaggagacagagcgagactccatctcaaaaaaaaaaagaaaaatgctccagtgatgtcccatttcacttagaagaaaattcaagttcttaccrtagcccatagggcctcccttgttctacacacctaccatccacctcatctcttctttcttcccgtactgtttttcttactgttccttagatacatcaagac

SEQ ID NO: 49649 - DNA, 201 bp, Homo sapiens
attgcaattctgatgcctaggataatataggcacttgatattcattgaataaataaaggaatgaataaaggaatgaatacaaggtggaggtgtagtataawgaagtggcttaaaagtcacgatctagagacagacatattaaactttaaatcatgatgctgtgtgatattaggcaagatatttaaactctctgaggctcag

SEQ ID NO: 49650 - DNA, 201 bp, Homo sapiens
acatagatgacactcaataagtggtatttggtggtggtgagactagaagcattaatagtattagacttttggacatagtgaagtggttaagaaagtaagcyttaaaggcagacaagttaaaattctagctttatcatttctgattctacgactttagcatctctgagcctcagttttctcatctataaaatggaaatgatt

SEQ ID NO: 49651 - DNA, 201 bp, Homo sapiens
gacctctgtcccagaaatcagagtttaccattgcttctgtaaccagttactgcaaacttagtggctaaaacaacacaaatttattcttttatgattatatwtctgcagatgagaagtccaaaatgggttttattgggctaaaatcaaggtgttggcagagctgcattccttctggaggctctgggggagaattgtttcctt

SEQ ID NO: 49652 - DNA, 201 bp, Homo sapiens
gccagaactaattaactttgttaccgtattctttccctcaagtcatacaccagagtaagaccgcctctgacaatacaattttatttacaaaaacaggaaaktggttgggtttggcccatgagccactgacatagtgacatagaactagcctgatataggcttcctggcacatagatgacactcaataagtggtatttggtg

SEQ ID NO: 49653 - DNA, 201 bp, Homo sapiens; identical to SEQ ID NO: 49010

SEQ ID NO: 49654 - DNA, 201 bp, Homo sapiens; identical to SEQ ID NO: 49011

SEQ ID NO: 49655 - DNA, 201 bp, Homo sapiens
acaggacagggattttcacagtgcttttctatacaatgtctgtaatctatagataacataaccgattaggtcacgggtcgatctttaactaccaggtccakggtgtggcgccgggctgtctgcttgtggatttcatttctgccttttagtttttacttcttctttctttggaggcagaaattgggcataagacaatatgag

SEQ ID NO: 49656 - DNA, 201 bp, Homo sapiens
caaccataatttcttctcttgagttatttcattgtctttctgtcctaactcagctgggatgcaggcttacattgacattaaaaactgcccaaagaaaaccrggaatcttaagaaaataactcgtgagcagaggcggcacatgaagaggtgggaatacttcattgctgcagaggaagtcatttgggactatgcacctgtaat

SEQ ID NO: 49657 - DNA, 201 bp, Homo sapiens
tgatggcaataatcataaagataatagtcatgcaagttattgtatcagccgctgaatagtaagtacctgatgttaatatggttctaattatcccattatgmtgatgttcagatcattgtaagcatagtagagttccatcaggcactggtataaaaaattgtatccatattataatagttgttggtatgagaacattttaaa

SEQ ID NO: 49658 - DNA, 201 bp, Homo sapiens
agtttttgtattttatttccagtttgaatctttctgtaacttcctttaagaaaattgtctacagagagtatgaaccatattttaagaaagaaaaaccacartctaccatttcaggtaagcctgaaatatacttttttaattttaaagataaatttctatgggtaatttggcattcacatgcatctaaaatatccatttact

SEQ ID NO: 49659 - DNA, 201 bp, Homo sapiens; identical to SEQ ID NO: 49014

SEQ ID NO: 49660 - DNA, 201 bp, Homo sapiens
aacagatattgaagactctgatgatattccagaagataccacatataagaaagtagtttttcgaaagtacctcgacagcacttttaccaaacgtgatcctygaggggagtatgaagagcatctcggaattcttggtcctattatcagagctgaagtggatgatgttatccaagtaagtcttttgagcactgctaagatctt

SEQ ID NO: 49661 - DNA, 201 bp, Homo sapiens
tttaaaactgttgagattagagttcatataaatggagactaaaatctaaggaaatgatatcacaataggaaatcattttgttaccaaaataatgtataagmaacacatataaggaagagatacttcatgagatcatttctgtttcttttcacacgagtagtcaaaattatatttgaagtaataaaaccatcatgatatccg

SEQ ID NO: 49662 - DNA, 201 bp, Homo sapiens
atatatacaatagccataatttttaaagaaaatctcttattttttcctcatctcttcctttatcaagaagactgggttgaatagggttctaatatcttaaytatgataccatattccgcagggatgatagagaccatcaagggagaacttcctccagttgaatccccttgtcagtaattcacctgtccctttccccaatca

SEQ ID NO: 49663 - DNA, 201 bp, Homo sapiens; identical to SEQ ID NO: 49016

SEQ ID NO: 49664 - DNA, 201 bp, Homo sapiens
aattttaacagattttacactttcagctatcaatggctatgtgcctgagagcataactactcttggattctgctttgatgacactgtccagtggcacttcygtagtgtggggacccagaatgaaattttgaccatccacttcactgggcactcattcatctatggaaagaggcatgaggacaccttgaccctcttccccat

SEQ ID NO: 49665 - DNA, 201 bp, Homo sapiens
acccctgggtatggaaaatggaaagatagaaaacaagcaaatcacagcttcttcgtttaagaaatcttggtggggagattactgggaacccttccgtgccygtctgaatgcccagggacgtgtgaatgcctggcaagccaaggtcaagtatactctatgcatggtgttctcttagggctccagaagaaagcaaaggccctc

SEQ ID NO: 49666 - DNA, 201 bp, Homo sapiens; identical to SEQ ID NO: 49018

SEQ ID NO: 49667 - DNA, 201 bp, Homo sapiens; identical to SEQ ID NO: 49022

SEQ ID NO: 49668 - DNA, 201 bp, Homo sapiens
acggaaaatgcatgatcgtttagaacctgaagatgaagagagtgatgctgactatgattaccagaacagactggctgcagcattaggaatcaggtcattcygaaactcatcattgaatcaggaagaagaagagttcaatcttactgccctagctctggagaatggcactgaattcgtttcttcaaacacagatataattgt

SEQ ID NO: 49669 - DNA, 201 bp, Homo sapiens
tggagtccaaagatatttaggagctaaagttgattaaacttggtgactcattagatgcagataatgaggaagaaaagggaattgttatggacttcaaggtktctggtttgaacagcagaatggatagggtgccattcagtgagaaagaaaatgtaagaaaaggagatagtttgtgagagaaggtgataagtatagatttgg

SEQ ID NO: 49670 - DNA, 201 bp, Homo sapiens
ctggaagaggggggtcagtcagtggagtccgacatgtcaggagtcaaaagaggtgtagacatctggactattctataaagatgggggcctgagcctgcccygtggaaggaatagggagagctttggctcaggagtccagagatctgagttctgatcccagcaatgctaccagatcactgactgaccttgggcaagtcacct

SEQ ID NO: 49671 - DNA, 201 bp, Homo sapiens
cagagggtagcagctggaagaggggggtcagtcagtggagtccgacatgtcaggagtcaaaagaggtgtagacatctggactattctataaagatgggggyctgagcctgccccgtggaaggaatagggagagctttggctcaggagtccagagatctgagttctgatcccagcaatgctaccagatcactgactgacctt

SEQ ID NO: 49672 - DNA, 201 bp, Homo sapiens; identical to SEQ ID NO: 8603

SEQ ID NO: 49673 - DNA, 201 bp, Homo sapiens
tgggtatggaaaatggaaagatagaaaacaagcaaatcacagcttcttcgtttaagaaatcttggtggggagattactgggaacccttccgtgcccgtctraatgcccagggacgtgtgaatgcctggcaagccaaggtcaagtatactctatgcatggtgttctcttagggctccagaagaaagcaaaggccctcactac

SEQ ID NO: 49674 - DNA, 201 bp, Homo sapiens
tcctatctatgaatcagtttttctctttatgcttttctctacgacaatgtagtgaagcagctccatttggggtacatatatggtaaaggaaggaacactayggtaggagctaaaggcctgttagtgtgctcttaacactgccacctcttctggtgtataatgatcccaaagagtcttttccaggaaaaaccgatagctggg

SEQ ID NO: 49675 - DNA, 201 bp, Homo sapiens
ctcaatacacttggtgagtgaatgtttgatcacagagtacttgactgaatgcttattttggcctgtgtctctccctctttctcagatataacagtttgtgyccatgaccacatcagctggcatctgctgggaatgagctcggggccagaattattctccattcatttcaacggccaggtcctggagcagaaccatcataag

SEQ ID NO: 49676 - DNA, 201 bp, Homo sapiens
aggattacaggcatgagccactgcacctggccatggatggtacctaatgttgtaaaatagcataatttaagataaaagcagaagaaaatcagtttaaaaartgattacatttcaggatttcagttgctttcttctaggatgccactatatctattaaagcaccagtcttgttagtgcatttaccattttataatcagatat

SEQ ID NO: 49677 - DNA, 201 bp, Homo sapiens
ctcggcctcccagagtgctaggattacaggcatgagccactgcacctggccatggatggtacctaatgttgtaaaatagcataatttaagataaaagcagragaaaatcagtttaaaaaatgattacatttcaggatttcagttgctttcttctaggatgccactatatctattaaagcaccagtcttgttagtgcattta

SEQ ID NO: 49678 - DNA, 201 bp, Homo sapiens
atgttcatgagtacccaatgtttagctcccacttataagtgagaacatgtggtatttggctttctgtttctgcattaattcacttagcataatagcctccrgctggcatccatgttgttgcaaaggacgtgatttcagtctttgttatggctgcgtagtattccatggtgcatatgtaccatattttctttatgtagtcca

SEQ ID NO: 49679 - DNA, 201 bp, Homo sapiens
tctaaatgcagttgttcctgctcaaagagacctctggccaaactggcaagcagttaaagttttctttcagggccttcctctctatggcctcaacttcctcytctctcttcttccagcaacttcccctttcatcattcctttccctggggacttggcattcagtgatcctgtagatattgcacaactggggaacctttagac

SEQ ID NO: 49680 - DNA, 201 bp, Homo sapiens
gacaattctccttaaatgtcatgtcacttcaccaagatagataagaattggacagcagagaattaaaggttgcaatctttgacaaaatcctagagtgtagwtaatctacagacaaaggatgatccaaaggctttgacaatcaaccaaatagaagataggattaaggttctcttttgcagattaaagagcctaactaggact

SEQ ID NO: 49681 - DNA, 201 bp, Homo sapiens; identical to SEQ ID NO: 49056

SEQ ID NO: 49682 - DNA, 201 bp, Homo sapiens; identical to SEQ ID NO: 8609

SEQ ID NO: 49683 - DNA, 201 bp, Homo sapiens
atgtttgtagtgattttgcctgtttcatctctgatattgtcatctgcccctcctttcttttttgtgtgaatcttgctagagatttgtcgattttaaaaaaatcttcttggccgggcgcagtggctcacgtctgtaatcccagcactttgggaggccgaggtgggcagatcacgaggtcaagagatcaagaccatcctgacc

SEQ ID NO: 49684 - DNA, 201 bp, Homo sapiens
gaactttttttcatatttttatattttgtatttttattttttttgtagagaagaggttgcccaagatcaaactcctggcctcaagtaatcctcccccctcrgcctcccagagtgctaggattacaggcatgagccactgcacctggccatggatggtacctaatgttgtaaaatagcataatttaagataaaagcagaaga

SEQ ID NO: 49685 - DNA, 201 bp, Homo sapiens
tttttaattttaaagataaatttctatgggtaatttggcattcacatgcatctaaaatatccatttactgaaaatttatagaaacgtgtggttttttttttaagaagtactggctacataatatgtggggcccagtgcaaaatgaaaatgtgagtccccttgttcatattattgaaaatttcacagtgactgcaaagcatt

SEQ ID NO: 49686 - DNA, 201 bp, Homo sapiens
agaactttttttcatatttttatattttgtatttttattttttttgtagagaagaggttgcccaagatcaaactcctggcctcaagtaatcctcccccctyggcctcccagagtgctaggattacaggcatgagccactgcacctggccatggatggtacctaatgttgtaaaatagcataatttaagataaaagcagaag

SEQ ID NO: 49687 - DNA, 201 bp, Homo sapiens
atagtttgcaccaacctaacacatgctgcctgaggagttagtgaaggcagcccctcgacagcactttgggtgacgttgtgtgaatctgcctcagatgcagrcacagaagtccaaatggactggtttgattaagagcagggaaaaaaagagggttcttattggtttttcacatgccagtaactcactaatacatctagagag

SEQ ID NO: 49688 - DNA, 201 bp, Homo sapiens
gtgtgtcttcttttgaaaagtgtctgttcctgtccttggcctactttttaatggggctgtttgtttttttcttgtaaatttaagttccttataaatgctcsatattagacctttgccagatgcatagtttgcaaaaattttctcccattctgaatgttgtctgtttactctcttgatagtttcttttgctgtgcaggagct

SEQ ID NO: 49689 - DNA, 201 bp, Homo sapiens
tgcgttaacttgcttagaataatggcctccagctccatccatgtccctgcaaaggacataatcttgttctttttgatggtcacatagtattctatggtgtwtatgtaccatattttcttcatccagtctgtcattgatgggcatttgggttgatttcatgtctttgctattgtgaagagtgcgaaaatgaacatacgcatg

SEQ ID NO: 49690 - DNA, 201 bp, Homo sapiens
aaccataatttcttctcttgagttatttcattgtctttctgtcctaactcagctgggatgcaggcttacattgacattaaaaactgcccaaagaaaaccasgaatcttaagaaaataactcgtgagcagaggcggcacatgaagaggtgggaatacttcattgctgcagaggaagtcatttgggactatgcacctgtaata

SEQ ID NO: 49691 - DNA, 201 bp, Homo sapiens
gccaagacagagggtagcagctggaagaggggggtcagtcagtggagtccgacatgtcaggagtcaaaagaggtgtagacatctggactattctataaagrtgggggcctgagcctgccccgtggaaggaatagggagagctttggctcaggagtccagagatctgagttctgatcccagcaatgctaccagatcactgac

SEQ ID NO: 49692 - DNA, 201 bp, Homo sapiens
tcttggcctaatcctttagcaatccctgtgtttttgagttcacatccaccatctctaagctctgttgttacctgtataatgccatttatcacaatgagttrtcactgcttgtttgctggtcactcagatgtctgcttttgcagggcacaaactacaactggagtgtctgttccctcaaagctttatacaatgcctgacaca

SEQ ID NO: 49693 - DNA, 201 bp, Homo sapiens
catgacttgtgatccatggacaagtgcatataagaaattttccagcttccaagagttgaggagggaaaaggtcacaggaatttaacaatgactgagtcacyaaacttgacatttcagcatttaggaaacacagttttcatctgtccatctgttcatccattctttaagccattactaagcactgttgagtatgaagcactg

SEQ ID NO: 49694 - DNA, 201 bp, Homo sapiens; identical to SEQ ID NO: 8583

SEQ ID NO: 49695 - DNA, 201 bp, Homo sapiens
tcctctctattcccttccccaaagaagtctgaatgcaaggagtctgcctgccattattataccaataaccttgagtctgtttctgcttatattttatatamaattatttactgtttattagttacctatttttaataattatttatactatgtctcagaaccattgaaatcctaaattatggttcttactaatcagtatta

SEQ ID NO: 49696 - DNA, 201 bp, Homo sapiens; identical to SEQ ID NO: 49071

SEQ ID NO: 49697 - DNA, 201 bp, Homo sapiens
ccagtaattagaacagaacagaacaggacagggattttcacagtgcttttctatacaatgtctgtaatctatagataacataaccgattaggtcacgggtmgatctttaactaccaggtccagggtgtggcgccgggctgtctgcttgtggatttcatttctgccttttagtttttacttcttctttctttggaggcagaa

SEQ ID NO: 49698 - DNA, 201 bp, Homo sapiens
tttgtcttgtctatttttatcagtaccatcactgccgaaggcaagtctagagtgtgataacatattttgtcttagtttcaaattccaggtctgttggtatyggatgtgttgagcaagttgattagcctttcctaatttcttccttttatcaaatgggtaataaccctcctaaaaatgttacaggtctgtttgggggttcag

SEQ ID NO: 49699 - DNA, 201 bp, Homo sapiens
atgagaacaaagagacaacataccagaatctctaggagacagggctttgcttttgctgcattctattcgttgtgaacacaaattacaggccagtctcgatwcagtgtagaagggaactgcataaggaccacataccaggaggcataattcactgggagcatctttagaaactaccagagttacctgttgcccataccagtg

SEQ ID NO: 49700 - DNA, 201 bp, Homo sapiens
aagaatggttctgccaatcagagtgccgacagcatctctgtgaagaaagtgcctggattatatagacacatcacaactctccaaggaagggctctaatttsgaattacctccatcagcccattttcaataagacctacctgagattcaaactaggcctgactcttccaaagtcctcaggtcactcaaacttcaatgtcatg

SEQ ID NO: 49701 - DNA, 201 bp, Homo sapiens
atttggcaagactctgggtgaggtagtgggaacaggagtttctcctatgttcttaaaatcatacagtgacatagtgaacaaccacttcacctacttatgargcttctagacgactgcatcagaagttcagcaatgtaaagaagaagggggagaaacctcaaaatatcaaaatgtcacatgcaggtttcatttcaaataagg

SEQ ID NO: 49702 - DNA, 201 bp, Homo sapiens
tttctgattctacgactttagcatctctgagcctcagttttctcatctataaaatggaaatgattataaccacccataagattgcctgaaatttaaatgargtcacttaggtagagtactaaacatggttcctgggatcggataagctctctataaataatgatgacaatgatggcaataatcataaagataatagtcatg

SEQ ID NO: 49703 - DNA, 201 bp, Homo sapiens; identical to SEQ ID NO: 49081

SEQ ID NO: 49704 - DNA, 201 bp, Homo sapiens
ctcgtgatttgcccgcctcggcctcccaaagtgctgagagtacaggcgtgagccaccgcgcccggcctcattgtggttttgatttgcatttctctcatgawcactgatgttgagctttttaaaatgtgctttttggccgcatgtagttgcttttgcaaactaaggtaataaagagggcaggggaaaagtggttcatgtttc

SEQ ID NO: 49705 - DNA, 201 bp, Homo sapiens
tcaaaaaaagaggatgcaaacactctgtatgtactaatacaaaaagttctccaagatatgttattaaattaaaaagctgggatgtagtatagcgtgtatayatagctgccttttgttaaaggagtgaaagggataagaatatttatattttcttatttgtaagacataaaggtattctggaattacacgcatgaaattaat

SEQ ID NO: 49706 - DNA, 201 bp, Homo sapiens
tttaataaattaggatacattcatacaatggaatactaagcatcaaaaaaagaggatgcaaacactctgtatgtactaatacaaaaagttctccaagataygttattaaattaaaaagctgggatgtagtatagcgtgtatacatagctgccttttgttaaaggagtgaaagggataagaatatttatattttcttatttg

SEQ ID NO: 49707 - DNA, 201 bp, Homo sapiens
tggaaatctaactatacagatacacttgttcacaggtgaaatgatgtatgtacaacatattcactgttgcaacgttagtagtagtaagactggaaacaacycaaaatgtccatcagtagaaaactagtttaataaattaggatacattcatacaatggaatactaagcatcaaaaaaagaggatgcaaacactctgtatgt

SEQ ID NO: 49708 - DNA, 201 bp, Homo sapiens
cagtcttgcttctcaatgcagaatcctttcttcccatgcactaactccctctttctcccttgccctttcaagccacctgcaccgcagacaaactttcctcrgttcctaacaaccaaacttagatattttgctcttagatttataacttgctctttggggatggagaaagcgaaggaattggcaaaggtttttttttttttt

SEQ ID NO: 49709 - DNA, 201 bp, Homo sapiens; identical to SEQ ID NO: 8574

SEQ ID NO: 49710 - DNA, 201 bp, Homo sapiens
cttttattttagattcagggggcatatgtgcagttttgttatctgggtatattatgtgatgctgttgtttagggtatgattgatcccatcatccaagtagmgtgcatagtacccaatagtttttcatcccttgctcatctccttccttcccccttctagaagtccccagtgtttattgccatctttatgttcatgagtacc

SEQ ID NO: 49711 - DNA, 201 bp, Homo sapiens
accctctcgcatcaccctctgtaattgaaatgaacatctttcttaagcaaagaaagttattgctaaggaatgacagtgggtcaaagtgggcaagacttggycagaactatttctcctactctgttgacttcttttgggtccaggacaagtgtttctaccattctattgtgatctgtgtacatgtaatgttgagttaatgag

SEQ ID NO: 49712 - DNA, 201 bp, Homo sapiens; identical to SEQ ID NO: 49083

SEQ ID NO: 49713 - DNA, 201 bp, Homo sapiens
catattttaaatatatgagttgcatatgaatgtgatgtcacaaaattagttctataatatatagccatctgctggtaagccagctctccaaataaaacacrttttctgccagacattgttcgttgtatctaagtgttgccaaattctctatacaaaaatttgctcttctagatttttccaaaacattccaatgcttgactt

SEQ ID NO: 49714 - DNA, 201 bp, Homo sapiens
ctttaaaaagcttgtttcatggagaatttaatattattcttttcttttagttatattctcatattttaaatatatgagttgcatatgaatgtgatgtcacmaaattagttctataatatatagccatctgctggtaagccagctctccaaataaaacacgttttctgccagacattgttcgttgtatctaagtgttgccaa

SEQ ID NO: 49715 - DNA, 201 bp, Homo sapiens
agcttcttatgaacaagaatcaagcttctttcatcttcacatctccactacctatcactctcatttcattagtagataatgtcagtactttagccttgagyctaagaacaaatatcttttggtatttctggagaaaactacttgggccatatctcacaggatggttatgaaaattaaatgaaataatatacataagttatt

SEQ ID NO: 49716 - DNA, 201 bp, Homo sapiens
ttggtgagtaagagtctggacactcacagaggaagcttgctttgaatttctggtctataaaggtctgctgcaactctccaggctaccagtgctcctctatktatctccctgaccccctgcaggcttttctttcaatgtttctcatgatttctctttgagaaattaatgacttaaatggatccagttctttagtgtgggtta

SEQ ID NO: 49717 - DNA, 201 bp, Homo sapiens
ttcgttgtatctaagtgttgccaaattctctatacaaaaatttgctcttctagatttttccaaaacattccaatgcttgacttaatgtaggtgattacatyttttcacttctcatctgaatattttggccttatgtagagacttccttgagtatatgataaacacctgaaacaaactataacggctatagtttgtatattt

SEQ ID NO: 49718 - DNA, 201 bp, Homo sapiens; identical to SEQ ID NO: 49084

SEQ ID NO: 49719 - DNA, 201 bp, Homo sapiens
taatattttgcccatatctcagcagtcgctcctatcatacatctatctccaaactagcttgtgagttccttcagtacagggactgtatttgatccaggtakccagaaactttctaacacagtgcctggcatgtagaaagtaaaacctcattcttgatttctgcacccataacctcctgtctctgctgtgttctcccattgc

SEQ ID NO: 49720 - DNA, 201 bp, Homo sapiens
ggagttttagaccagcctgggcaatgtagtgagactctgtttctatttaaaaaaatacatacatatatatatatatatatatatatatatatatatatatwtaaattagccagacatggtggtacatacctgtcatttcagctactggggaggctaaggcaagagggtcatttaggacaagagcatcacttgagcccagga

SEQ ID NO: 49721 - DNA, 201 bp, Homo sapiens
actaaaataaggactgaactttgtgacctccacagtcctgtgtaaagctaacataaaaacaaacaaaaagcttcaggcacaagatcagaataaactccagsagtaggagttcaaggaaaggaataggacaaccgtgggtggcaagacaggggtagggaaagataggacctctgtcccagaaatcagagtttaccattgctt

SEQ ID NO: 49722 - DNA, 201 bp, Homo sapiens
aggagttttagaccagcctgggcaatgtagtgagactctgtttctatttaaaaaaatacatacatatatatatatatatatatatatatatatatatatatttaaattagccagacatggtggtacatacctgtcatttcagctactggggaggctaaggcaagagggtcatttaggacaagagcatcacttgagcccagg

SEQ ID NO: 49723 - DNA, 201 bp, Homo sapiens
caggagttttagaccagcctgggcaatgtagtgagactctgtttctatttaaaaaaatacatacatatatatatatatatatatatatatatatatatatatttaaattagccagacatggtggtacatacctgtcatttcagctactggggaggctaaggcaagagggtcatttaggacaagagcatcacttgagcccag

SEQ ID NO: 49724 - DNA, 201 bp, Homo sapiens
tggaggaactgccatactgtcttccacaatggctgaattaatttacattccaccaagagtgtataagtgttcctttctctccatgaccttgccagcatctsttctttcttgacttttcaatcatcgccattctgactggcatgagagggcatctcattgcgtttttctttctttttttgagacggagtctcgctctgtcgc

SEQ ID NO: 49725 - DNA, 201 bp, Homo sapiens
agtaatattcagtggcatctagaatattttctctttccatttgcatttgggcacttatgagaaggcaaaatcatagcaatcgttaagagaaaaaataactrattcccacttagaccacatctcttctatttctctctggtagaactgacctacaactaaagatccagggtatatgatactagcctgagggaaaaacattaa

SEQ ID NO: 49726 - DNA, 201 bp, Homo sapiens
gccaggagttttagaccagcctgggcaatgtagtgagactctgtttctatttaaaaaaatacatacatatatatatatatatatatatatatatatatatatatttaaattagccagacatggtggtacatacctgtcatttcagctactggggaggctaaggcaagagggtcatttaggacaagagcatcacttgagccc

SEQ ID NO: 49727 - DNA, 201 bp, Homo sapiens
tatgaggccatgtagcaagaagcattgaagaagggctgtcatgcttgattcaaggtagatggtgcagctcatcaactagccatgctaatttcagttaatasacaagttctgacctgagagggcaactctccttatcagtcctgtttgtgctttgttaccaaagctcttttgtaatctttcacagataatgcttcctgctta

SEQ ID NO: 49728 - DNA, 201 bp, Homo sapiens
aataattcaaacagaaaattactctcagctttctttgcataacttccttttggcagtgaatctatcatagttctagaccagtgctgtccaatagaaactaygtatgagctacatgcgtaatttaaaattttctgatagcaacattaaaaagtaaagagaaataggtgacattaattttagtaatatgttttacttaactca

SEQ ID NO: 49729 - DNA, 201 bp, Homo sapiens
aactaggcacaatggctgacctcatggcacttatacccagtgagagacagatattaatagataatctcacaaataaattatatataatctacaatatataytctagagatattataagaatactacaggaatttactatatatactataataatactatagaaatatgagaaattgatatagagacttgacctagtctaaa

SEQ ID NO: 49730 - DNA, 201 bp, Homo sapiens
ctttgggagatttttttttattatactttaagttttagggtacatgtgcacattgtgcaggttagttacatatgtatacatgtgccatgctggtgcgctgyacccactaactcgtcatctagcattaggtatatctcccaatgctatccctcccccctcctttgggagatttttaggtaatgaggatggagccctcatgat

SEQ ID NO: 49731 - DNA, 201 bp, Homo sapiens
ttttaatttttaaaggaacctcccatactgttttccataatggctgtactaatttacactctcaccaagagtatacaagagttcccttttcttcacatccwtgccaacatttatctcttgtcatttttataatagccatcctaacggtgtgaggtgagccctcattgtgattttaaattgcatttctctgattattagtaa

SEQ ID NO: 49732 - DNA, 201 bp, Homo sapiens
ctttcttaagcaaagaaagttattgctaaggaatgacagtgggtcaaagtgggcaagacttggccagaactatttctcctactctgttgacttcttttggstccaggacaagtgtttctaccattctattgtgatctgtgtacatgtaatgttgagttaatgagctgctaaaaccttctagattgaaaataagtgagtcag

SEQ ID NO: 49733 - DNA, 201 bp, Homo sapiens
tctctcaccccaaaacatttgcaaggcaagaaactctcctgacagtcttgcttctcaatgcagaatcctttcttcccatgcactaactccctctttctccyttgccctttcaagccacctgcaccgcagacaaactttcctcagttcctaacaaccaaacttagatattttgctcttagatttataacttgctctttgggg

SEQ ID NO: 49734 - DNA, 201 bp, Homo sapiens
cagttggaaagaagatctgaaatagcaaaacaaaataatacataaacagctctgactatcctcccatctcatgttaataggctaagtatgtcttattaaasaccacaaagaagatatcacccattcttatattctgagatggtttactaatcaaaggcgattcaattctctgattatatttaaataataattgttcaggta

SEQ ID NO: 49735 - DNA, 201 bp, Homo sapiens
ataaaaatccctctcattacccctttatagtcacatctgccttcctcccaccatagcccttccttattccctggcaaccagtagtctgatctccatttctrtaattttgtcatttcaagaatattacataaatggaatcaggcaacatgtaacctttggggactggtattttttcactcagtataattctctggagattca

SEQ ID NO: 49736 - DNA, 201 bp, Homo sapiens
ccgagggagtgagatgcagggcctgtccagagtgaatagggatggaaccaccttcaaaatcttgtattccattcaaggctcacaacccacttttatggcaktcggagttgctttacccactcccttgtgttctgtgagtttgcatgttatgctcagagtctggaaagatgggattagtaggggaggtagaccagaagaaag

SEQ ID NO: 49737 - DNA, 201 bp, Homo sapiens
ttaatctgatgcctgacatctccacattagaactctgtttaaaacaccttttcctatgacttcctatttaaatgttgcactcaataccacatgagaacaactagctacctgagtatttctaagcaaggccccgagggagtgagatgcagggcctgtccagagtgaatagggatggaaccaccttcaaaatcttgtattcca

SEQ ID NO: 49738 - DNA, 201 bp, Homo sapiens
gatgtagaaatctcctttttgcatttacttgtttagatcagaatttctaagagatccaaatcccttttttaaaagaatatttacaattcagttttgcttasgggtagaaagccatgttgaactgggctctttgttctgggatgaagatacagaaagagaagagagaggaggaaaggagcaaggcttagtcaactacaaatt

SEQ ID NO: 49739 - DNA, 201 bp, Homo sapiens
cattaatctgatgcctgacatctccacattagaactctgtttaaaacaccttttcctatgacttcctatttaaatgttgcactcaataccacatgagaacaactagctacctgagtatttctaagcaaggccccgagggagtgagatgcagggcctgtccagagtgaatagggatggaaccaccttcaaaatcttgtattc

SEQ ID NO: 49740 - DNA, 201 bp, Homo sapiens
ataaatatataaaattttatcaacgaaattcataacaatctctcagaccacagagaaatcaaattagaactgaggactaagaaactcactcgaaaccacayaactacatggaaactgaacaacctgctcctgaatgactactgggtaaataatgaaattaaggcagaaataaataagttccttaaaaccaatgagaacaaa

SEQ ID NO: 49741 - DNA, 201 bp, Homo sapiens; identical to SEQ ID NO: 8613

SEQ ID NO: 49742 - DNA, 201 bp, Homo sapiens
tccttattttaagagctttgtgatattccttgaggcaactagaagcatagtaaaatgttgcaaaaccagagttataaaatcagtgatctaagttaaacaawcaccttccagagagttatactgtccctgatattagcccactgagtaattcaggtgatttaatttgggggtaactcttaatatttgactcatttttattaa

SEQ ID NO: 49743 - DNA, 201 bp, Homo sapiens; identical to SEQ ID NO: 8616

SEQ ID NO: 49744 - DNA, 201 bp, Homo sapiens
taccctagaacttaaagtataatttaaaaaaaataaaaataaaagaattccttttgcaatattaattggttccagcgaaagcttatttatttatttattaycatgaaataactttgcaaatgaaaacaattttgaatatattttctttcaggcaggaacaacaccatgatcagagcagttcaaccaggggaaacctatact

SEQ ID NO: 49745 - DNA, 201 bp, Homo sapiens
gatcctcagagtctagagtcatggtaatcaccttctctagtaggtaatcacacatgtgaggatgatttctgcatgttctgttcatatagcttcagatgacygacagctagggattatcagagctgacaggtgccaggtcaaataattcaaacagaaaattactctcagctttctttgcataacttccttttggcagtgaat

SEQ ID NO: 49746 - DNA, 201 bp, Homo sapiens
tcatcgcctttggaatagatacatcactacaatggattggaagtttgtgtcctccaaaaattcacatactgaaatctaacctccagtgtgatggcattagyaggtggggcctttgggagatttttttttattatactttaagttttagggtacatgtgcacattgtgcaggttagttacatatgtatacatgtgccatgct

SEQ ID NO: 49747 - DNA, 201 bp, Homo sapiens
gtagccctagaagaaatctagaggtcaaacctatcacaattagggcaccaacatgtaccctagagttaactaggcagagcccctcaggggcccaggccctktcttctttacatttgtactctggcatttagcacagagcctggaacctagtggatgatgatggtcatgatcatgatgatattaatcattactgaactaaac

SEQ ID NO: 49748 - DNA, 201 bp, Homo sapiens
ccaggctggtctcaaactcctgacctcgggcaatctgcctgcctcagcttcccaaagtgctgggattacaggcatgagccattgcgcccggctgaacaatktattttcttttttggctatatacccagtaatagaattgctaggtcaaattgtagcaggacaagccacagacaaaaacccctcagacaccaagttaaagaa

SEQ ID NO: 49749 - DNA, 201 bp, Homo sapiens
tctggaattacacgcatgaaattaatatatggctacctagaaaattcagggagggtagggaggtcattttgagagtcatcagagaaaagtgagagttttcwctgtaataaaaattatgtgaatgtattttctattaaaaacaattaaactaggaaaaagaacaaaaaaaatttggccaagattatagaattgttgacagaa

SEQ ID NO: 49750 - DNA, 201 bp, Homo sapiens
taggcaaacaacaataagcagtggctagaaattgatctactcaagatcaagaagataacggcaattataacacagggctgcaagtctctgtcctctgaaaygtatgtaaagagctataccatccactacagtgagcagggagtggaatggaaaccatacaggctgaaatcctccatggtggacaaggtagagtggcatctg

SEQ ID NO: 49751 - DNA, 201 bp, Homo sapiens
tgtctttcccagaatcatcctagtctgtcctgcctcttctgatctcctttaatcttcaatatttagtcaatgggagtcttcctttcagttaaaaatcaacractaaaccaaaaccaaatcaaaccatgtccagttaactcctatctagaaaaagaaaaaaaaaaatctccccttgaccctgcctgccttttccttttctct

SEQ ID NO: 49752 - DNA, 201 bp, Homo sapiens
ctagtagtaatagtaatttagaaatatcttcaggtgttttcctaaaaattaaataaaatgaagttaaataaaatgagtaaggaaagtaaagatgtctccaygccctccaaaagtgagcaagtttcttcagtgtcttcctagttctggtaatttctttcaaaatcttgtgtccagacccacgattataacttgcttttataa

SEQ ID NO: 49753 - DNA, 201 bp, Homo sapiens
aatgagcatagatgtgccttcgcaaaatgatattttgcttccatttggctccctagattcattcaaaggaactatgtatggctgactcttttgcatctctktcccgtctattcttctgtttatttagtgtgatatatacaatagccataatttttaaagaaaatctcttattttttcctcatctcttcctttatcaagaag

SEQ ID NO: 49754 - DNA, 201 bp, Homo sapiens
tatgatgaccatggcttcttcaaggacaagccctagcaggaaggatcagcaggaagattgcagtaaagatgaacagattaggagtaatcctcaacacacamaaaaaaccagcatttcaaaaggtgacagaagagtaatattcagtggcatctagaatattttctctttccatttgcatttgggcacttatgagaaggcaaa

SEQ ID NO: 49755 - DNA, 201 bp, Homo sapiens; identical to SEQ ID NO: 49111

SEQ ID NO: 49756 - DNA, 201 bp, Homo sapiens
gcacaaagtacaaagtaagacatctaagtttcaggggatggacacatttcatattcatacagacaaccagcctgcataggggagttagacgctgtggctckggggaaaaaattgagataatcagatggctaagatgaaataaagagataaaacaaagctgaggatcacagcagttggaaagaagatctgaaatagcaaaac

SEQ ID NO: 49757 - DNA, 201 bp, Homo sapiens
gggtttcaccatgttggctaggctggtctcgaactcctgacctaaggtgttccacctgcctcagcctcccaaagtgctggtattacaggtgtgagccactstgcccggctcttttgggatattttaatctctgaattttcttatctgttctgtttgcttttgcatattacctttagctctaacaagtgctgtgtacacaat

SEQ ID NO: 49758 - DNA, 201 bp, Homo sapiens
ctcttgagtagctgggattacaggcgcccgccaccacccccatgtaatttttgtattttttagtagagacagggtttcaccatgttggctaggctggtctygaactcctgacctaaggtgttccacctgcctcagcctcccaaagtgctggtattacaggtgtgagccactgtgcccggctcttttgggatattttaatct

SEQ ID NO: 49759 - DNA, 201 bp, Homo sapiens
ttgggcctactactcagctgtgaacccagtaggtactttcattgaaagtttttctcattcccctaacctcgtaatctgaagtccaccaaatggaagagtcrgggttatttcttgtcaaatgtctgtcttgcttttcatgaggaatgcataagggtgtggttaacagtctgcatttatcataaccagggactctccatgcag

SEQ ID NO: 49760 - DNA, 201 bp, Homo sapiens
attacattgctgctgaagaaatatcctgggattattcagaatttgtacaaaggtttggccagttttctccttttttattctcatttttccattactgctgmaaaaagtagctactacaattcagggggataattgtgggcaaattatactaagaacagtgtggttcccctattgcaagttggcctgttctttttcctttgt

SEQ ID NO: 49761 - DNA, 201 bp, Homo sapiens
gagatcagactggggtgaccaaacattccattttgccgtggactttttaccagttctaatagttaaagtcctgaatcttgggaaacccctcagaccagaamagtcggttaccttcttggttcccttcttggcctaatcctttagcaatccctgtgtttttgagttcacatccaccatctctaagctctgttgttacctgta

SEQ ID NO: 49762 - DNA, 201 bp, Homo sapiens
caggggcacattattctgcctactacacccaccaaacaaagccctcccacggtgtcctccatctcagagaatggcaccctcctccacccagctccccaaaycagaacctcatcagccatccacagcaactgatgtcctttattctctaccccacatccaatccatcttcaagttccaactattttatctcataaatacatc

SEQ ID NO: 49763 - DNA, 201 bp, Homo sapiens
gagagcagtggcaccattttagatcactgcaacctctgcctcctgggttcaagtgattctcctgcctcagtctcttgagtagctgggattacaggcgcccrccaccacccccatgtaatttttgtattttttagtagagacagggtttcaccatgttggctaggctggtctcgaactcctgacctaaggtgttccacctgc

SEQ ID NO: 49764 - DNA, 201 bp, Homo sapiens
ggacagcccagaagaatctcatctcaagattcttaatcatagatacacagtcccttttgccatataaagtagcatatttccaggtcccagagattaggacrtggacatctcagcaggggcacattattctgcctactacacccaccaaacaaagccctcccacggtgtcctccatctcagagaatggcaccctcctccacc

SEQ ID NO: 49765 - DNA, 201 bp, Homo sapiens
gggggagggatagcattaggagatatacctaatgttaatgacaagttaatgggtgcagcacaccaacatgacacatgtatacatatgtaacaaacctgcaygttgtgcacatgtaccctagaacttaaagtataatttaaaaaaaataaaaataaaagaattccttttgcaatattaattggttccagcgaaagcttattt

SEQ ID NO: 49766 - DNA, 201 bp, Homo sapiens; identical to SEQ ID NO: 8599

SEQ ID NO: 49767 - DNA, 201 bp, Homo sapiens
cacgagggctgtgtaccattaaacaacagtaaaatcattagtaatttttcggtcctgttttcttcaaagcactagagaagttgaccatactcactgttttscaactccctatcaagaaggaaatattttctctttttttttttaaacaggaaatagaagagacaaattagaagctagagaagaaatgtgcagccttgttag

SEQ ID NO: 49768 - DNA, 201 bp, Homo sapiens
ccccccaccaagggtcttactctgtcacccaggctggagtgcagtggtgtgatcatggctcactgcaacctccacttcctgggctcaggcgattctcgcayctcagcctctcaagtagctgggactacaggcacacgccccaacgcctggctaatttttgtatttttttgtagagatgaggtttcaccatgttgcccaggc

SEQ ID NO: 49769 - DNA, 201 bp, Homo sapiens
ataaatatgctattttaaaaaataagaatttcttcaagttgaaatcattatggttgattgcttgccctaaactctttgctatccaggaaagctaatgagcrtcttctatctgcagtgctactgaaaacatgtctttcctttcatagggaccctaactgagggtgggacacagaagacgtttgacaagcaaatcgtgctact

SEQ ID NO: 49770 - DNA, 201 bp, Homo sapiens
taaaactcagtttagaccttctgatctttctccaaacacatatcaccaaccatgtgattaggcattttgttaggccagagacaggacaataactgtactgygtatcaagctctacttatggttttatcaggtctctcaaatgttacatttatttgaaatattagaagaaattgaactatttctgctctttgacattaacag

SEQ ID NO: 49771 - DNA, 201 bp, Homo sapiens
caactatctgtgctgaaagaccttttttcccctctaatctccactaagcaacacttttgttttttattctgttaagcgagatgaacgcactggtcatgtgyttagagtcacagcaatgtcaaattgctttagaaaaacaaaagtttactaaatatttcattctcatttttctctccttgtgttattttgacccagtaatca

SEQ ID NO: 49772 - DNA, 201 bp, Homo sapiens
gactatcctcccatctcatgttaataggctaagtatgtcttattaaacaccacaaagaagatatcacccattcttatattctgagatggtttactaatcaraggcgattcaattctctgattatatttaaataataattgttcaggtaccctggaaaattaacttgctaaactttaatttacaaataacatttgttattct

SEQ ID NO: 49773 - DNA, 201 bp, Homo sapiens
ccccaagtatattttataaccaaattgatttagtttggaccccatgaaaatgtagtattacaatattaaattagatcaaaattttaatataaagtcacttyatagatcattgttacataactaaactttcctcttttcttctagtattttaatggcaattcagatgcctctacaataaaagagaatcagtttgacccacct

SEQ ID NO: 49774 - DNA, 201 bp, Homo sapiens
aggtgggaaaataaatcaacccacgttatgtggtatcgtgtaaacaaaataactgattgttctactacacatttttgctttaaaactgttgagattagagytcatataaatggagactaaaatctaaggaaatgatatcacaataggaaatcattttgttaccaaaataatgtataagcaacacatataaggaagagatac

SEQ ID NO: 49775 - DNA, 201 bp, Homo sapiens
aacgcctggctaatttttgtatttttttgtagagatgaggtttcaccatgttgcccaggctggtcttgaactcctgagctcaagtgatccacctgcttcakcctcccaaagtgctggggttacaggtttgagccactgaacctagctgagaagatgacttcaaagacagtgtcctaaaaaatctaccgggcaggggaaggg

SEQ ID NO: 49776 - DNA, 201 bp, Homo sapiens; identical to SEQ ID NO: 49130

SEQ ID NO: 49777 - DNA, 201 bp, Homo sapiens
cttgtgagttccttcagtacagggactgtatttgatccaggtagccagaaactttctaacacagtgcctggcatgtagaaagtaaaacctcattcttgatktctgcacccataacctcctgtctctgctgtgttctcccattgcagtaactaataacatcatttacccagttgttctgataaaacaccttgaggtcatcct

SEQ ID NO: 49778 - DNA, 201 bp, Homo sapiens
cacgccccaacgcctggctaatttttgtatttttttgtagagatgaggtttcaccatgttgcccaggctggtcttgaactcctgagctcaagtgatccacstgcttcagcctcccaaagtgctggggttacaggtttgagccactgaacctagctgagaagatgacttcaaagacagtgtcctaaaaaatctaccgggcag

SEQ ID NO: 49779 - DNA, 201 bp, Homo sapiens
aaactaggaaaggaaaaagaaaagaaagggaagagaaaggaaggggagggaaaggattaatcatttcagttttcaaaaagtgtagttgcttcagtaagagkagttttattggccttttaccccatcatgtaaaacatttcaggcttttttccccagatccttgttgtctgcctacatccacactgatgttctcaccttctt

SEQ ID NO: 49780 - DNA, 201 bp, Homo sapiens
gtggtgtgatcatggctcactgcaacctccacttcctgggctcaggcgattctcgcacctcagcctctcaagtagctgggactacaggcacacgccccaaygcctggctaatttttgtatttttttgtagagatgaggtttcaccatgttgcccaggctggtcttgaactcctgagctcaagtgatccacctgcttcagcc

SEQ ID NO: 49781 - DNA, 201 bp, Homo sapiens
gagcatagaaatgggcatatgtgaatctttccaaataataaaagttcactattgaaggacatatgcatctccagagaactcatcttagctatccccagatktgagagtggtgaaaacgcaatcctcagaaactgcccacatgtcttgatggctgttactcctccaggtgcttcttaccttgaccacacattccctgcggag

SEQ ID NO: 49782 - DNA, 201 bp, Homo sapiens; identical to SEQ ID NO: 49143

SEQ ID NO: 49783 - DNA, 201 bp, Homo sapiens
agtacatgagcatagaaatgggcatatgtgaatctttccaaataataaaagttcactattgaaggacatatgcatctccagagaactcatcttagctatcmccagatttgagagtggtgaaaacgcaatcctcagaaactgcccacatgtcttgatggctgttactcctccaggtgcttcttaccttgaccacacattccc

SEQ ID NO: 49784 - DNA, 201 bp, Homo sapiens
tatcaaagcctttgtaagtacatgagcatagaaatgggcatatgtgaatctttccaaataataaaagttcactattgaaggacatatgcatctccagagarctcatcttagctatccccagatttgagagtggtgaaaacgcaatcctcagaaactgcccacatgtcttgatggctgttactcctccaggtgcttcttacc

SEQ ID NO: 49785 - DNA, 201 bp, Homo sapiens
acaacaggatatttttgaagagaccaataattatttcattaactttacttattgatcatatttataaaactgtggacttctgaaatacaataaagatactrgtattctactagaagtctgaagatatgagagatctactttttttgtaatgtgagaaatagatattgaatatgcctttcaaattagtttttgtattttatt

SEQ ID NO: 49786 - DNA, 201 bp, Homo sapiens
ccatgagaatccagcccatctttcattaaaacaaacaaccacagtgagccacagcatgggaaataacgtgatggactcaccatctgcctatacatacacgctcaggccatacctacatacatgcccaatgtatttactcattatacaaagactttttttccatttcctggtatatataagatactgtgatggtactgaaaa

SEQ ID NO: 49787 - DNA, 201 bp, Homo sapiens
ggagcatagaagtctaggctccccattcagcctttgctgttgtgggttggggaggggcctcaggtttttctgtggtgtttggctaaaggagagaagtcagygtccaccagttttctatcatatctcgctatgctgccctttactggtactttggttagagaaagcagattttatttgggctttttcagtctgtactcattg

SEQ ID NO: 49788 - DNA, 201 bp, Homo sapiens
ggtcctattatcagagcccaggtcagagacacactcaaagtaagtaacacaaatacagaatcatgggagaaattacatagtaaaatattatggagtacctrgttattttttaattttaaaagaaaaagatgctcatataattttaaattcaaatgcaacttttagtttttatttagtatttgtatttatttacagcttact

SEQ ID NO: 49789 - DNA, 201 bp, Homo sapiens
aaaggattaatcatttcagttttcaaaaagtgtagttgcttcagtaagaggagttttattggccttttaccccatcatgtaaaacatttcaggcttttttycccagatccttgttgtctgcctacatccacactgatgttctcaccttcttctcgtaaagaatttatcaagttattgtaccaaacaaaaataactgcatcc

SEQ ID NO: 49790 - DNA, 201 bp, Homo sapiens
ataatttctcaaaccaaattggaaaacattataagaaagttatgtacacacagtacgaagatgagtccttcaccaaacatacagtgaatcccaatatgaargaagatgggattttgggtcctattatcagagcccaggtcagagacacactcaaagtaagtaacacaaatacagaatcatgggagaaattacatagtaaaa

SEQ ID NO: 49791 - DNA, 201 bp, Homo sapiens
ttggataatttctcaaaccaaattggaaaacattataagaaagttatgtacacacagtacgaagatgagtccttcaccaaacatacagtgaatcccaataygaaagaagatgggattttgggtcctattatcagagcccaggtcagagacacactcaaagtaagtaacacaaatacagaatcatgggagaaattacatagt

SEQ ID NO: 49792 - DNA, 201 bp, Homo sapiens
cccatgagaatccagcccatctttcattaaaacaaacaaccacagtgagccacagcatgggaaataacgtgatggactcaccatctgcctatacatacacrctcaggccatacctacatacatgcccaatgtatttactcattatacaaagactttttttccatttcctggtatatataagatactgtgatggtactgaaa

SEQ ID NO: 49793 - DNA, 201 bp, Homo sapiens
acactaaactttatctttacagttttgtgttacatttttaaggtgatcaagtttctcaggaactttttaaaaaatccgcgtattttactgtggggagagtmgataaagcctgagaaccctagttatctaatctgagaagtgggcagaggagttgtcataccaataagagaataaacatgacttgctatggttgctggatac

SEQ ID NO: 49794 - DNA, 201 bp, Homo sapiens; identical to SEQ ID NO: 49199

SEQ ID NO: 49795 - DNA, 201 bp, Homo sapiens
aaatgtcacctaatttatgaactatttgcagcaccacacaggctaaatgtgtgacccaactcagttgcaacataacatgcagtttctcccaagccactgtrtgtcatacagatgaggtcttaagcagatgaaaaaatgaatcccacagggctcaggcagctacagctatctctgctgggagggtttccagattcttcagtt

SEQ ID NO: 49796 - DNA, 201 bp, Homo sapiens
gacaaaacatataaaacagaagttttcagacatcgaatgacagacaactcaagacagtaaaagaagagtaacaaaccagatgtgccctatgagcacctaarcttactgcttgaagagtgtttccagggaacagcacaagcagggagaacccagacagagtctctatgggttgaggaaatagagtttggacttcggagaagc

SEQ ID NO: 49797 - DNA, 201 bp, Homo sapiens
agatttaccctttttctcaacaactagacaggcagacaaaacatataaaacagaagttttcagacatcgaatgacagacaactcaagacagtaaaagaagwgtaacaaaccagatgtgccctatgagcacctaagcttactgcttgaagagtgtttccagggaacagcacaagcagggagaacccagacagagtctctatg

SEQ ID NO: 49798 - DNA, 201 bp, Homo sapiens
tccatgctcagaacctcatgagatacattgcacgttactgtagtacctgaatccttcattgctattgaatggatgtgccttattttccactcccacctggrgaatccaaacatatgctgatgccatgcaaactcatgcaaagcgttttgagtggaatagattttccacagttgggatggggaaaggtacaattaaagaagg

SEQ ID NO: 49799 - DNA, 201 bp, Homo sapiens; identical to SEQ ID NO: 49226

SEQ ID NO: 49800 - DNA, 201 bp, Homo sapiens
gtgcatcgttggacgcctcccctgggtcaagctccccatttacatcttggtgcagttgctgtctgctttctgtgcttcgggagccacctatgttctctacyatggtgacagagggaacagagggagctgtgccttgagagcacctgtgggtgggcaggggtgcctcagaatggttttggatgaatgagcaaagagggaaat

SEQ ID NO: 49801 - DNA, 201 bp, Homo sapiens
ggggctgtcgggtgcccggggacggggcagagcgggggtctgcgtacaggatgggaggatggggtgccgaaggggcgcgtggagagcaggagagcggcgcragtgccaaggagaagctcgtgcagccttggccaggggagacccgcccagagagttgttgggcgagaggagtaaccgggacccgagggtttggtgcctgga

SEQ ID NO: 49802 - DNA, 201 bp, Homo sapiens
tgatgtctgttcactgcaacctctgcccctgggttcacgcgattctcctgcctcagcatcccgaatagctgattttacaggcacctgctaccacgcctggmtaatatttgtgtttttagtggaaacggggtttcaccatgttggccaggctggtctggaattcctgacctcaagtgatccactgcctcggcctcccaaagt

SEQ ID NO: 49803 - DNA, 201 bp, Homo sapiens
ctttgaatgcatttaattggagccttgagatatgaagaagtaggatgcggttacttcatgcagagcaagagtagcatgcacccagagaaggccaggtggarctcagcatgagtgtgaaggcctcatgtcaagccatgtcaggggacacaaagatggagtattctctaacctatgtgacactcggcataagggaagtacaag

SEQ ID NO: 49804 - DNA, 201 bp, Homo sapiens
tttttgagatggagtttcactctgttgcccaggctggagagcagtggtgtgatgtctgttcactgcaacctctgcccctgggttcacgcgattctcctgcstcagcatcccgaatagctgattttacaggcacctgctaccacgcctggctaatatttgtgtttttagtggaaacggggtttcaccatgttggccaggctg

SEQ ID NO: 49805 - DNA, 201 bp, Homo sapiens
ctgtttctccagtgtctagacgtagattctttgaatgcatttaattggagccttgagatatgaagaagtaggatgcggttacttcatgcagagcaagagtrgcatgcacccagagaaggccaggtggaactcagcatgagtgtgaaggcctcatgtcaagccatgtcaggggacacaaagatggagtattctctaacctat

SEQ ID NO: 49806 - DNA, 201 bp, Homo sapiens
cccaggacagtggtagagcccacagggttacataaatcataatggtagccctcaagaacttcataaactgtatatggtattttaaaaagttgcatattgtytgtttccacctactagaacataagctctagaagggcagagactatgttttgttcaccactgtttctccagtgtctagacgtagattctttgaatgcattt

SEQ ID NO: 49807 - DNA, 201 bp, Homo sapiens
gcatcggtgtgcttgggtggagccttgagacatagtgtgttgctgtggaaaaagcagacagacctaggttccaactttggattcacagtgtcttcttcttytttttttttttttttttttctttttttttgagatggagtttcactctgttgcccaggctggagagcagtggtgtgatgtctgttcactgcaacctctgcc

SEQ ID NO: 49808 - DNA, 201 bp, Homo sapiens
ataaatcataatggtagccctcaagaacttcataaactgtatatggtattttaaaaagttgcatattgtctgtttccacctactagaacataagctctagragggcagagactatgttttgttcaccactgtttctccagtgtctagacgtagattctttgaatgcatttaattggagccttgagatatgaagaagtagga

SEQ ID NO: 49809 - DNA, 201 bp, Homo sapiens
aggcgcccaccaccatgcccggctaatttttttgtatttttaatggagacggggtttcaccatgttagccaggatggtctcaatctcctgactttgtgatyccgccttggcctcccaaagtgctaggattacaggcatgagccgccgcactcagcctgaattatttctagtgtgagatccaagaaccctctcttgggatct

SEQ ID NO: 49810 - DNA, 201 bp, Homo sapiens
catgaataatccacctcttgtttagcatatcatcaagaaacaaccataaacatgggcaaccagcagccctcggggctgctctgtctatggagtagccattsttttattcctttactttcctaataaacttgctttcactttactctatggactcgccctgaattctttttttcttttttttgaggcggagtctcgttctgt

SEQ ID NO: 49811 - DNA, 201 bp, Homo sapiens
gcctcccgagtagctgggactacaggcgtgcaccaccacgctaatttttttgtattttagtagagatggagtttcaccatgttggccaggatagtcttgawctcctgacctcgtgatctgcctgcctcggcctcccgagaaaccaagtctttactaaaaaatatcaaaattagccaggtgtgatggacctgtagtcccatc

SEQ ID NO: 49812 - DNA, 201 bp, Homo sapiens
ctttcactttactctatggactcgccctgaattctttttttcttttttttgaggcggagtctcgttctgtcacccaggctggagtgcagtggtgcgatctyggctcactgcaacctccacctcccgggttcatgccattctcctgcctcagcctcccaagtagctgggactacaggcgcccaccaccatgcccggctaatt

SEQ ID NO: 49813 - DNA, 201 bp, Homo sapiens
gccctgccatgggtttgtaccctcaaatgcctatgagttgggtaaattcttttcttttttcccacattctttccctttcttcttcctccactttccccatytcttttcccttccctccttctgcttttctccttcccttgcttgtcttctgtgctcattcatctccttggctgctcccctggccttcccaacctttctccc

SEQ ID NO: 49814 - DNA, 201 bp, Homo sapiens
gaggggctgtcgggtgcccggggacggggcagagcgggggtctgcgtacaggatgggaggatggggtgccgaaggggcgcgtggagagcaggagagcggcrcgagtgccaaggagaagctcgtgcagccttggccaggggagacccgcccagagagttgttgggcgagaggagtaaccgggacccgagggtttggtgcctg

SEQ ID NO: 49815 - DNA, 201 bp, Homo sapiens
tcctaataaacttgctttcactttactctatggactcgccctgaattctttttttcttttttttgaggcggagtctcgttctgtcacccaggctggagtgyagtggtgcgatctcggctcactgcaacctccacctcccgggttcatgccattctcctgcctcagcctcccaagtagctgggactacaggcgcccaccacc

SEQ ID NO: 49816 - DNA, 201 bp, Homo sapiens
gttccaaaattatgagaaattcctataattctaatatgacttagcgtatgttattaataattgttacataaaattttgtatgcaacagaagtaaccaaaayttcctagttaattgtggctttactagtggctgtcctaagactttttttttttttttttttgagacagattcttgctctgtcacccaggctggagtgcagt

SEQ ID NO: 49817 - DNA, 201 bp, Homo sapiens
ataccaacactttccaactgagctcctctctaccacgaatatgagagattctaagagttaggcaaaaatatcatcgcccctattcatcctgaagaacttasagaagatggaccttcgtccctctgcaacccttaggattagtgcttctcttataaaaggaaggggggaaatgtcagaggcacgtgaaccagagcaagtcta

SEQ ID NO: 49818 - DNA, 201 bp, Homo sapiens
gcagatcacaaggtcaggagttcaagactaacctggccaacatggtgaaaccccatctctactaaaaataccaaaaaattagccaggcatggtggtgcgcrcctgtaattccagctactcaggaggctgaggcagtagaatcacttgaacccaggaggcagaggttgcagtgagccgagatcatgccattgcactccagcc

SEQ ID NO: 49819 - DNA, 201 bp, Homo sapiens
ttcccttcccttcccttcccttcttttcttttctttcagatggagtttcattctttcaggctggagtgcaatggcacagtcttggctcactgcaacctccrcctcccaggttcaagagattctcctgcctcagcctcctgagtagctagggttacaggcacccgccaccacatctggctattttttttgtattttttagta

SEQ ID NO: 49820 - DNA, 201 bp, Homo sapiens
aacccgggaggcagaggctgcagtgagccgagattgagcgactgcactccagcctgggtgatggagcgagactctgactaaaaagaaacaaacaaacaaamaaaaaaaaatgtaaacatttggtctaaattatacaggtcagatattaagtttgctaaattctttaaggtcataagctgcttctttgactattaaaaattg

SEQ ID NO: 49821 - DNA, 201 bp, Homo sapiens
gggcacaaacccatggcagggctcagctttaaaaagtcttatccaagattctttctatggaacagagttccatcaaagccaattttaaaagcctacgtgamaaataattattcttgctgcactttatacaatcatcaggccaagtataataaagcacattggtcttaccataaaaatggtctttcataaaaatgggaaact

SEQ ID NO: 49822 - DNA, 201 bp, Homo sapiens
gaggctgggggaggggcagggtcagagctggagaagagggtcttcaaaagaggtctcatgaggggagggaagggttatcctcagcttcctgacctcattcrtctgtcacttcttgcagggtctcccatgggattgctgggatcttgctgggtgagatggcagtgtgtgcaaaaaagcgccccccaggtaagacaggcaagg

SEQ ID NO: 49823 - DNA, 201 bp, Homo sapiens
cccccttcctctcaactccctatcacttttcgtttttatcctctcgtctctcctaatctcctttcctctcctacttcatcatttttattcttgtcattttwattctttctttaataacaagtgtatcatagttcttgaaacataatttttctctcttcagtttcccatttttatgaaagaccattttcatggtaagaccaa

SEQ ID NO: 49824 - DNA, 201 bp, Homo sapiens
aggctgcggctcctgcagtcggggagcgggcgggggcggaaccctgggcgtgctcggcgtgtccggggccactcagcgcacgctggcatccgccggggggmatggggggcggcggcggcggcgcagctgagctcgcggtgtccccgagcgccggcggccgggaggatggcctgggctgcgggtggggcgcgcgcccgacgg

SEQ ID NO: 49825 - DNA, 201 bp, Homo sapiens
tggctcacgcttgtaatcccagcactttgggaggccaaggaaggtgaatcactagaggtcaggagtttgagaccagcctggccaacatggtgaaaccccgkcttttttttttttttttttttttttttgagacaaagtctcgctctgttgccaggctggagtgcagtggcacaatctcggctcactgcaacctccgcctcc

SEQ ID NO: 49826 - DNA, 201 bp, Homo sapiens
ctctcctcctctttccccctcccacacctgtgtttgctagcttttggggtagaggtctggggaagtataaagatgggggaggcagcctcagtctggttctsggttgggactggagactgctcattatcttctctcctactgccatagagtaactgcatcaagacctccaagtacaatattctcaccttcctgcctgtcaac

SEQ ID NO: 49827 - DNA, 201 bp, Homo sapiens
tgcctgtcaacctctttgagcagttccaggaagttgccaacacttacttcctgttcctcctcattctgcaggtaggtgacccatagtagattttttgcagytccccaaactgaataaagccaaggaagaggaaagggaatgaaggcatcagatggggcctcagaggcatacttctctttctttttttcagttgatccccca

SEQ ID NO: 49828 - DNA, 201 bp, Homo sapiens
tctgctatcgtgctgaatttttcatgccttcacctgtcagtgaagcagaatacattgacccccttgagactcccttctctcctcctctttccccctcccayacctgtgtttgctagcttttggggtagaggtctggggaagtataaagatgggggaggcagcctcagtctggttctgggttgggactggagactgctcatt

SEQ ID NO: 49829 - DNA, 201 bp, Homo sapiens
ctggagggaagaatttgatgaccccctcagttgtggagctaactccttaaaatgatattctgtggaaaaaaacagggaaccccccagcaaagtgttggtcyagacctcagtttgctcctcctgactgcagcatcattttgttgcagaagaagaaaggagggcgcgggctaatgaccgagaatacaatgagaaattccagta

SEQ ID NO: 49830 - DNA, 201 bp, Homo sapiens
aaaacagggaaccccccagcaaagtgttggtccagacctcagtttgctcctcctgactgcagcatcattttgttgcagaagaagaaaggagggcgcgggcyaatgaccgagaatacaatgagaaattccagtatgcggtaagcgactctagaccacctgttccctctctctgtttggagaggggaatggggcaaggacaac

SEQ ID NO: 49831 - DNA, 201 bp, Homo sapiens
aagggacaactggtatgggtctgagggagggtagcttacagcagcccctacccagcttgggggcagcctaggaaaccgaattcttccgcttgatcccaaarctgggttatctgccaggacagcgcagagcaccagccccacgccccgaaacacctgcagtcttatcttcgggcacctgcagctcctgctttctggcctagg

SEQ ID NO: 49832 - DNA, 201 bp, Homo sapiens
aaaaacagggaaccccccagcaaagtgttggtccagacctcagtttgctcctcctgactgcagcatcattttgttgcagaagaagaaaggagggcgcgggstaatgaccgagaatacaatgagaaattccagtatgcggtaagcgactctagaccacctgttccctctctctgtttggagaggggaatggggcaaggacaa

SEQ ID NO: 49833 - DNA, 201 bp, Homo sapiens
cccaggtaagacaggcaaggaggggagatcccgggaaccatcaagagtgggtgttgttatggctcagggagcaaaaggaaaagggacaactggtatgggtytgagggagggtagcttacagcagcccctacccagcttgggggcagcctaggaaaccgaattcttccgcttgatcccaaagctgggttatctgccaggaca

SEQ ID NO: 49834 - DNA, 201 bp, Homo sapiens
aacaataagaattgcttaaatcaaacattttatcagaaaagtaaaaagtggaataccctttatttagttcatgtgacttaagtaatctttgggaaataaawacagttttaaagattattggtaaaataaaaaatcttcaaaaatgtaaacattttgtccgggtgcggtggctcatgcttgtaatctcagcactttgggagg

SEQ ID NO: 49835 - DNA, 201 bp, Homo sapiens
gcagtgtgtgcaaaaaagcgccccccaggtaagacaggcaaggaggggagatcccgggaaccatcaagagtgggtgttgttatggctcagggagcaaaagsaaaagggacaactggtatgggtctgagggagggtagcttacagcagcccctacccagcttgggggcagcctaggaaaccgaattcttccgcttgatccca

SEQ ID NO: 49836 - DNA, 201 bp, Homo sapiens
ttttttctttttttttgagatggagtttcactctgttgcccaggctggagagcagtggtgtgatgtctgttcactgcaacctctgcccctgggttcacgcrattctcctgcctcagcatcccgaatagctgattttacaggcacctgctaccacgcctggctaatatttgtgtttttagtggaaacggggtttcaccatgt

SEQ ID NO: 49837 - DNA, 201 bp, Homo sapiens
gggcagggcaacgtggctgatgggcctgacctgctcagaaaacccaggctgtgtgagactaagaaggaaaagtgagaggggatcccagttcccaggtctcycctctcttccccttggaatgatggcccccccagaggggatgaggtctggggccaagcctgcttccagtctccccagggtctcagaggtagaacaactttc

SEQ ID NO: 49838 - DNA, 201 bp, Homo sapiens
atctctccatcctgcttcctcacactaatgcttggctcacctagacagaaatcaatggcagggcacgaagggcagctgctatcctcttgtatcccccaccygaagtcctctgggggctcatctccactcaggacctctcctgtttgtaccccagatacacactgcatcggtgtgcttgggtggagccttgagacatagtgt

SEQ ID NO: 49839 - DNA, 201 bp, Homo sapiens
tggggctgggtgacggggcagggcaacgtggctgatgggcctgacctgctcagaaaacccaggctgtgtgagactaagaaggaaaagtgagaggggatccsagttcccaggtctctcctctcttccccttggaatgatggcccccccagaggggatgaggtctggggccaagcctgcttccagtctccccagggtctcaga

SEQ ID NO: 49840 - DNA, 201 bp, Homo sapiens
tcatcagagcacgtgggatgtgcatgccagtttgtctgtctggtgatggtggaaacgcaaatccttctgtgactcgtggacattatccccttgaacagtgycccagactgaaataagcctttggccccaccagcccctcctctttctgtatctctccatcctgcttcctcacactaatgcttggctcacctagacagaaat

SEQ ID NO: 49841 - DNA, 201 bp, Homo sapiens
caagcactcaatatgtgagtttcattcccacagtctgtggtctttagcccagtctttccagatgcctattgagttcttcaagcatccaaatggtttggggwaaggcttcaggttctaaatgagaggctttgtgggttaccagctggagagtcagaaaatctggatttgaattcactcagccatgaaataattgtgtgatct

SEQ ID NO: 49842 - DNA, 201 bp, Homo sapiens
gatggagtattctctaacctatgtgacactcggcataagggaagtacaagcactcaatatgtgagtttcattcccacagtctgtggtctttagcccagtcyttccagatgcctattgagttcttcaagcatccaaatggtttggggaaaggcttcaggttctaaatgagaggctttgtgggttaccagctggagagtcaga

SEQ ID NO: 49843 - DNA, 201 bp, Homo sapiens
ggcatgtaaccttcggtgaggcatctttctgacttgaagggcattgcccaatgagggaggtagctatgtggtatcagcagctggtatttcctacatgtagygaatgggcatattggctcccaagggggaatctgggtggagcactatagtatccattaaacctagtaaagaaatattatttctttactagtcacacagatg

SEQ ID NO: 49844 - DNA, 201 bp, Homo sapiens
tgacagtgtgcctatgcagacagagggagcagtgaatagcaatagggtgtttccaccatggtcttcactcaggccccggctgaaatcatgggccacctccrgatacgcagcctcctggcccggcagtgcctggcagagtttctgggtgtgtttgtactcatggtaggtaggatcactgcgggaaggaaagaagggggttgg

SEQ ID NO: 49845 - DNA, 201 bp, Homo sapiens
tccttctatttgtcaggatgggggaggctagtcctgtgatgactgggaatgaagggtaaaagagacagaggttgggtaaactccaggctctgtgttcatarcctgctcccagacattctcttgttatctctctgtttcctagcctacacacgtgcacagacacgtagctgctgttcaggaactgagctaatggttttaaag

SEQ ID NO: 49846 - DNA, 201 bp, Homo sapiens
attatttctagtgtgagatccaagaaccctctcttgggatctggattcagacccctttcctgtaacaagattaggcaccaggagaaactgacacacatggrtgatataacagatgcctaaatggatcctatgggggaactggagctggaacagccctttagagttgtcgcaaagtgaggcaaagaggctagacttttatat

SEQ ID NO: 49847 - DNA, 201 bp, Homo sapiens
taattattcttgctgcactttatacaatcatcaggccaagtataataaagcacattggtcttaccataaaaatggtctttcataaaaatgggaaactggaragagaaaaattatgtttcaagaactatgatacacttgttattaaattccagtctcatcagttgtctttaagtttgtttctgcaatttaggctaaccctgc

SEQ ID NO: 49848 - DNA, 201 bp, Homo sapiens
agcaatctttttgcctttgcttaaaacattgctgatcctttgttttattttttagagtcaaggcaacttttcttttcagatatttacagcttttaataatygagtaaagtatactcctgtgaacaaaatttggagtatatgcatctctctacttgatttctccagaatttggaaattatttgtgtgtattcttaatttatg

SEQ ID NO: 49849 - DNA, 201 bp, Homo sapiens
acttgggaggctgaggcaggagaattgcttgaacctgggaggtggaggttgcagtaagctgagatggtgccactgcactccagcctgggggacagagcaaractctctctcagaaaaaaaaaaaaaaaaagtttgatcttggggagttctaaggcccactagcctcatctgtagaatggaagcaatagtactactttgcag

SEQ ID NO: 49850 - DNA, 201 bp, Homo sapiens
gggaagggttatcctcagcttcctgacctcattcgtctgtcacttcttgcagggtctcccatgggattgctgggatcttgctgggtgagatggcagtgtgygcaaaaaagcgccccccaggtaagacaggcaaggaggggagatcccgggaaccatcaagagtgggtgttgttatggctcagggagcaaaaggaaaaggga

SEQ ID NO: 49851 - DNA, 201 bp, Homo sapiens
tcgtgatctgcctgcctcggcctcccgagaaaccaagtctttactaaaaaatatcaaaattagccaggtgtgatggacctgtagtcccatctacttgggargctgaggcaggagaattgcttgaacctgggaggtggaggttgcagtaagctgagatggtgccactgcactccagcctgggggacagagcaagactctctc

SEQ ID NO: 49852 - DNA, 201 bp, Homo sapiens
ggagcgggtgtagactggggagcaccgggggccaagatttgggagctgcggccagacggggcggggatggcggccgactggagacgaggggctgtcgggtkcccggggacggggcagagcgggggtctgcgtacaggatgggaggatggggtgccgaaggggcgcgtggagagcaggagagcggcgcgagtgccaaggaga

SEQ ID NO: 49853 - DNA, 201 bp, Homo sapiens; identical to SEQ ID NO: 8630

SEQ ID NO: 49854 - DNA, 201 bp, Homo sapiens
gtttcaccatgttggccaggctggtctcaaactcctgacctcaaatgttccacctgcctccgcctcccaaagtgctgggattacagatgtgaaccactgcrcctggccctaagactttttatcatccacagacaattgttgtcttgttttgatcttctttagaaggtagtttataatcagccataggactttaacaggtgc

SEQ ID NO: 49855 - DNA, 201 bp, Homo sapiens
agccagatgacatggaatatttggatgagagagggcagatggagcacctggcagctgacagggaaccctctgcctctgttgactccaaggttctgggcacygggatgctgattgtggggctcttggccatcctggacagacggaacaagggagtccctgcgggtctggagcctgtggtggtggggatgctgatcctggccc

SEQ ID NO: 49856 - DNA, 201 bp, Homo sapiens
gcatcgttggacgcctcccctgggtcaagctccccatttacatcttggtgcagttgctgtctgctttctgtgcttcgggagccacctatgttctctaccayggtgacagagggaacagagggagctgtgccttgagagcacctgtgggtgggcaggggtgcctcagaatggttttggatgaatgagcaaagagggaaatcc

SEQ ID NO: 49857 - DNA, 201 bp, Homo sapiens
tatgtgagatagtgaacattaccgtggcttggcatttttgttggcttgtacctagcccaggtgaatagattatttacagtaagttttctggtatgttaaamgtagctcatccccactcttaccaactttgaggactctggaaggtttcaaggtgccagattgagagctaatcaactatttcagtttcttcatcatatagat

SEQ ID NO: 49858 - DNA, 201 bp, Homo sapiens
ttggacaagcttgcactagagcatctgagcttttgagggctcaagggatgaatacatcacagatgcacttggttttgagggcttcctacatgtcagcctcrcctgtgcttctcattcctccccagatttttggattcctggtttgcatgggggtgatcctggccattggcaatgccatctgggagcacgaggtggggatgc

SEQ ID NO: 49859 - DNA, 201 bp, Homo sapiens
gggaggttgaggcaggaaaatggcgtgaacccgggaggtggagcttgcagcagtgagccgaggtcgcgccactgcactccagcctgggcgacagagcaagrctccatctcaaaaaaaaaaaaaaaaggccatctatgtgagatagtgaacattaccgtggcttggcatttttgttggcttgtacctagcccaggtgaatag

SEQ ID NO: 49860 - DNA, 201 bp, Homo sapiens
gctacctgctgtgggaggcagagatggggtggctggaaaggcctcgtgtgaacactggggggctctgtggggccatgtggctgttcagtgtgttggtgctyatctgttcttcctggggacagacaccctgtgcagctggccacagaggcctctgcgtcagcctggtcccaggtgctgtgggtcggaggcctctgtgtcagc

SEQ ID NO: 49861 - DNA, 201 bp, Homo sapiens
ccttcctgtgccccgactgtctgctgcctgcccgccacatgccagcttgtgaaggctggggctagcctctggtgagcttgtttccgccctggctttaaagrgtgtgcggaaacccagcctggtgggcgaggttgtctatcacataagggctccagtcgccccctggtggccattgggcaccaatctcctattttgtttcaa

SEQ ID NO: 49862 - DNA, 201 bp, Homo sapiens
ctagaaatctgaactccttgttgggctctcctccccttcctgtgccccgactgtctgctgcctgcccgccacatgccagcttgtgaaggctggggctagcytctggtgagcttgtttccgccctggctttaaagggtgtgcggaaacccagcctggtgggcgaggttgtctatcacataagggctccagtcgccccctggt

SEQ ID NO: 49863 - DNA, 201 bp, Homo sapiens; identical to SEQ ID NO: 49802

SEQ ID NO: 49864 - DNA, 201 bp, Homo sapiens
ccagcgagaccaacatgaaagtacgtcaggcgattccagtcacctcagaattgggagacatcagtaagcttgccaagtttgacggtgagtaattttggagsagcagcctgaaggtagaggagtggggttgggttttgtttgggggcgttaaattatacattttcctttgggctttttgttgttattatgcaactccctgga

SEQ ID NO: 49865 - DNA, 201 bp, Homo sapiens; identical to SEQ ID NO: 49804

SEQ ID NO: 49866 - DNA, 201 bp, Homo sapiens; identical to SEQ ID NO: 49806

SEQ ID NO: 49867 - DNA, 201 bp, Homo sapiens; identical to SEQ ID NO: 49807

SEQ ID NO: 49868 - DNA, 201 bp, Homo sapiens; identical to SEQ ID NO: 49811

SEQ ID NO: 49869 - DNA, 201 bp, Homo sapiens; identical to SEQ ID NO: 49822

SEQ ID NO: 49870 - DNA, 201 bp, Homo sapiens; identical to SEQ ID NO: 49823

SEQ ID NO: 49871 - DNA, 201 bp, Homo sapiens
gaatgggtgaagtgtgccgggtgactcttgatgtgtttatgttgggggtctttgcctgtctgaatttttctggcactttcttcacctgccccattcatagkgcggaatccagaggggaagatccgactctactgcaaaggggctgacactatcctactggacagactgcaccactccactcaagagctgctcaacaccacc

SEQ ID NO: 49872 - DNA, 201 bp, Homo sapiens
gatgccactgatgactatgtgagtggttttcattcttctattttgtcccagtcacccacccctactcccagccccacccccatctcatggccaccttcatycagcacaatttcttggtgaccttgacatcccttacccggtccagctagatccatgatgtctttttgctgagcgtggggagagggaatcagggagtgaact

SEQ ID NO: 49873 - DNA, 201 bp, Homo sapiens; identical to SEQ ID NO: 49825

SEQ ID NO: 49874 - DNA, 201 bp, Homo sapiens
ccccaggactccatacttggctctaagcttttctcttctgtgcagggtccttgaaggtccccatgcaaacccatggtttaaataagatttgtttaaacaartaagatttaacaattaaatggagagtcaccattgttcacctctagattggacttcttccttccactccacgctccagacccttgtattcaattatccatt

SEQ ID NO: 49875 - DNA, 201 bp, Homo sapiens
tgaatagaggtcggtaccatggctcacgcctgtaatcccagcactttgggaggccgaggtgggcggattgcctgaggccaggagttcgagaccagtctggwcaacatggtgaaaccctgtctctattaaaaatacaaaaattattagctgggcgtggtgctgcatgcctgtaatcccagctattcaggaagctgaggcagg

SEQ ID NO: 49876 - DNA, 201 bp, Homo sapiens
agattccccaaatagccctcaactctctcccagcccccaatcttactgctggtgataataaatagaagatacagcatttctgtgctgagagaatatagttwaggcttttccagggtgtgaagaggagagttgggaggttctgggtttagtcctgcctcctcactggccatgtgacctcaggaaaatccacggtcactcagg

SEQ ID NO: 49877 - DNA, 201 bp, Homo sapiens; identical to SEQ ID NO: 49801

SEQ ID NO: 49878 - DNA, 201 bp, Homo sapiens
tctctggcttcctctccttctggtcctacatcatcatcctcaacaccgttgtgcccatttcactctatgtcaggtatgtgccttctctgacctggggtctstccagggagtcaggcggtcccatagaacttttcttttctatgaagatgaagtccttgagaagtaacgagaagtcctcttcttcctgtactgtaaacattt

SEQ ID NO: 49879 - DNA, 201 bp, Homo sapiens; identical to SEQ ID NO: 49824

SEQ ID NO: 49880 - DNA, 201 bp, Homo sapiens
cccaggtttctgtgcccaggtgtcttctccgttcttgtctctccccaggcggagggcctgcagcgaaggcccatgtgggtggggcacctcctcttcttccygacccaagcctcacctcttgtcccctgtgcagtgtggaggtcatccgtctgggccacagctacttcatcaactgggataagaagatgttctgcatgaaga

SEQ ID NO: 49881 - DNA, 201 bp, Homo sapiens
gcctcgtgactcccaaggccactgactcctcttcatccccagggaatgcccagaacaccttggcccagcccacggtgtggctgaccattgtgctcaccacrgtcgtctgcatcatgcccgtggttgccttccgattcctcaggctcaacctgaagccggatctctccgacacggtgagaagccaggctacctgctgtggga

SEQ ID NO: 49882 - DNA, 201 bp, Homo sapiens
gctcaacctgaagccggatctctccgacacggtgagaagccaggctacctgctgtgggaggcagagatggggtggctggaaaggcctcgtgtgaacactgkggggctctgtggggccatgtggctgttcagtgtgttggtgcttatctgttcttcctggggacagacaccctgtgcagctggccacagaggcctctgcgtc

SEQ ID NO: 49883 - DNA, 201 bp, Homo sapiens; identical to SEQ ID NO: 8651

SEQ ID NO: 49884 - DNA, 201 bp, Homo sapiens; identical to SEQ ID NO: 8652

SEQ ID NO: 49885 - DNA, 201 bp, Homo sapiens
aagtccagaaggcatttccaggtctgatctgacttgcaatctcttagtcatttgactgtgttggctgccttctccttgaaactctgccctctgctgacttkgttccactttctcttggtttaactgctgcctctctggttgatccttctgtctccttccttggagctccttcctctgttcttcttcctaccatgccccagg

SEQ ID NO: 49886 - DNA, 201 bp, Homo sapiens
cctctgctgactttgttccactttctcttggtttaactgctgcctctctggttgatccttctgtctccttccttggagctccttcctctgttcttcttccyaccatgccccaggactccatacttggctctaagcttttctcttctgtgcagggtccttgaaggtccccatgcaaacccatggtttaaataagatttgttt

SEQ ID NO: 49887 - DNA, 201 bp, Homo sapiens
gcctggggagggtgtagacttatcttgccgggctgagagagggaagtctttcccaatactagtctattaaaacacacactgggctgggcgcagtggctcaygcctgtaatcccagcactttgggaggccaaggcgggtggatcatctgaggtcaggagttcgagaccagcctgactaaaatggcttcaccctgtctatacg

SEQ ID NO: 49888 - DNA, 201 bp, Homo sapiens; identical to SEQ ID NO: 49831

SEQ ID NO: 49889 - DNA, 201 bp, Homo sapiens
agaggttctgtcttgtttatcactcagtcccccagggcctagctattttctggtacatactcttaaaaaatgcttattaaaggaggagagaaggagcctcrgaaaatttcttagggttctctgtatgtgacatcagctgtcttcctgtgcctgatgtgtagcaaagaaaggttgcatgctcccttgctccctgttctcttc

SEQ ID NO: 49890 - DNA, 201 bp, Homo sapiens
ttcctcatgggccactcttcatttcactcgcagccccgcagtgcacagctacaagctgggggttcatctcttcctggtcccctactaccttgggtgcagcwcttctgccagaaccttctgggcgcctgctgctgtgcctgggctccccacgcagggagggacacccctggggcggaaggcaggcagctgcatagctgagtg

SEQ ID NO: 49891 - DNA, 201 bp, Homo sapiens
cacacacacacacacacacacacacacacacacacacacacacacacacacagtggcccggcatggtggctcatgcctgtaaccccagcactttgggaggycaaggtgggcagatcgcctgaggccaggagttcgagaccagtctggccaacatggtgaaaccctgtctctactaaaaatacaaaaattagctgggtgtcc

SEQ ID NO: 49892 - DNA, 201 bp, Homo sapiens
tcctctatttcagtgagcagcacgcgatctcaccagtcaccaaagccagacacacatgtcctggagaaaaccctacaacctctgctctggggccaccacactgtaaatcatatatttcatcttctttgatgtggagcatgaaatgattaagctgcaatgtcctgagccactgtttcccagtgattgtgacccaggcagggt

SEQ ID NO: 49893 - DNA, 201 bp, Homo sapiens
acttacccaggtgtgcctttccactctgcctccaggagtacgcaggggaagggctgaggaccctggtgctggcctacaaggatctggatgaagagtactaygaggagtgggctgagcgacgcctccaggccagcctggcccaggacagccgggaggacaggctggctagcatctatgaggaggttgagaacaacatgatgg

SEQ ID NO: 49894 - DNA, 201 bp, Homo sapiens
tagttttcccacgtgaaacaggaacaggagtacttgtctcaccttttaataggatgtcttgatataagatattggcttagaagatacattttaaacttaartgactgtacagttactgggtggtagcctgctcattgtgactgttgccactcccttctgcattactatttaaatgcctttgtgcttacaacctaattttgt

SEQ ID NO: 49895 - DNA, 201 bp, Homo sapiens; identical to SEQ ID NO: 49852

SEQ ID NO: 49896 - DNA, 201 bp, Homo sapiens; identical to SEQ ID NO: 8630

SEQ ID NO: 49897 - DNA, 201 bp, Homo sapiens; identical to SEQ ID NO: 49855

SEQ ID NO: 49898 - DNA, 201 bp, Homo sapiens
gccactcttcatttcactcgcagccccgcagtgcacagctacaagctgggggttcatctcttcctggtcccctactaccttgggtgcagcacttctgccaraaccttctgggcgcctgctgctgtgcctgggctccccacgcagggagggacacccctggggcggaaggcaggcagctgcatagctgagtggctgcttcta

SEQ ID NO: 49899 - DNA, 201 bp, Homo sapiens
cagctacaagctgggggttcatctcttcctggtcccctactaccttgggtgcagcacttctgccagaaccttctgggcgcctgctgctgtgcctgggctcyccacgcagggagggacacccctggggcggaaggcaggcagctgcatagctgagtggctgcttctacaacacctggagaaccgctggggctagaagcaaac

SEQ ID NO: 49900 - DNA, 201 bp, Homo sapiens
atcctctatttcagtgagcagcacgcgatctcaccagtcaccaaagccagacacacatgtcctggagaaaaccctacaacctctgctctggggccaccacactgtaaatcatatatttcatcttctttgatgtggagcatgaaatgattaagctgcaatgtcctgagccactgtttcccagtgattgtgacccaggcaggg

SEQ ID NO: 49901 - DNA, 201 bp, Homo sapiens; identical to SEQ ID NO: 49800

SEQ ID NO: 49902 - DNA, 201 bp, Homo sapiens
cgcatcctctatttcagtgagcagcacgcgatctcaccagtcaccaaagccagacacacatgtcctggagaaaaccctacaacctctgctctggggccaccacactgtaaatcatatatttcatcttctttgatgtggagcatgaaatgattaagctgcaatgtcctgagccactgtttcccagtgattgtgacccaggca

SEQ ID NO: 49903 - DNA, 201 bp, Homo sapiens
aggtgagagtctgatttttataccaaagaggaaatgattttttttcatattttgtttgtctatattatataaatatatatatacagttatatatatatatwttattttttggttctctctcgttttttagggagggaagaaagtaccaagttgcattgagctgtaattaaggaacattataatttatgacacatttctata

SEQ ID NO: 49904 - DNA, 201 bp, Homo sapiens
ctgtaattaaggaacattataatttatgacacatttctatacttgcaaaaattatatcattttatggatataagagaaaaatgcctttttataaaatttcratttctgagaagtgtgtaatttgtctcttttctgatgtttaaccaagactggtggtgaaagtaaagacagaaactgtctcttaaatgtaattgagtgggt

SEQ ID NO: 49905 - DNA, 201 bp, Homo sapiens
tctgtctcaaaaaaaaaaaaaaaaaatggaaccaatagattgaatgtggggtccaaagaagagagagaaatgaatcaagataaaaaacaacaaaaaaacagaaattaaaaaaaaatttttacagaaatgaatcaagatccattgcagggtttttagttggagcaactgaatgggttgtggcatttcctgagttgagaaaga

SEQ ID NO: 49906 - DNA, 201 bp, Homo sapiens
ctctgtctcaaaaaaaaaaaaaaaaaatggaaccaatagattgaatgtggggtccaaagaagagagagaaatgaatcaagataaaaaacaacaaaaaaacagaaattaaaaaaaaatttttacagaaatgaatcaagatccattgcagggtttttagttggagcaactgaatgggttgtggcatttcctgagttgagaaag

SEQ ID NO: 49907 - DNA, 201 bp, Homo sapiens
ccgtgagattccagagatgttttgaaaatggaaacaacaggccgggcgcggtggctcaagcctataatcccagtactttgggaggccgaggtaggcggatyacctgaggttgggagttcaagaccagcctgacccacatggagaaaccccatctctactaaaaatacaaaattagccggacttggtggcacatgcctgtaa

SEQ ID NO: 49908 - DNA, 201 bp, Homo sapiens
cactgcaatgtctgcctcccgggttcaagcaattctcatgccttggactcctgagtagctgagactacaggcaagtgccatcaggactggctaattttttwaatgtttttagtagagacggggtttcaccatgttggccaggctggtctcaaactcctgacctcaggtgatccatccgcctcaacctcccaaaatgctggg

SEQ ID NO: 49909 - DNA, 201 bp, Homo sapiens
agtttttgaagaaagtcaaaagaatgtattctgtattctaaaaatgcattctaagtgttacagctcttttagaatttgtctagcaggttttccagttttcmctggaacccctcccccacaaaaagaaaaaaatgcattctaaaaaaaaactaaagaatgctttaggaagtattgactggcagtagtgtacagcatgaatag

SEQ ID NO: 49910 - DNA, 201 bp, Homo sapiens; identical to SEQ ID NO: 49814

SEQ ID NO: 49911 - DNA, 201 bp, Homo sapiens
gagaatcgcttgaaaccggaaggtggaggtagcagtgagccaagatcacgccactgcactctagcctgggcaacgagcgaaactgtgtctcaaaaaacaaygaaacaaacaaacaaacaaaaaagtttttgaagaaagtcaaaagaatgtattctgtattctaaaaatgcattctaagtgttacagctcttttagaatttg

SEQ ID NO: 49912 - DNA, 201 bp, Homo sapiens
agttggccagggtcttgggccaagagcaagagctggaaacatagcttgctcctgattgtggaggcttttgaatatttgcctgtggactttgtatttactaaccattaaaagttattgaaaagactgggcacggtggctcacacctgtaatcccagcactttgggaagccaaggtgggcggataacgaggtcaggaattcga

SEQ ID NO: 49913 - DNA, 201 bp, Homo sapiens
tgtactgtaaacatttgatgttatctgtttatctttgtgggcagagcaaactttttaccacagtttcctggtacttgggactgtattagagaaaaaaaaaatattgatttattcagcacctatttattacatgcctactgtgtacaaagaagtgtgctaggtgccatcacaaataaaagatgaattaggaatggatctcct

SEQ ID NO: 49914 - DNA, 201 bp, Homo sapiens
gctctgcggctgaaggaaggagctgagttctcctgcttatctctgctccagtgtcctatcttgaaggactgtgtcctgaccccagtgagaaacatgacctrtctgaccctcccaacccttcctggaaactttccagttctcagtgagttgctgggagctgccctgctggacacccgcctggggagggtgtagacttatctt

SEQ ID NO: 49915 - DNA, 201 bp, Homo sapiens
tggaaggaaaggaccatgtcccactctccactccttcctcatgggccactcttcatttcactcgcagccccgcagtgcacagctacaagctgggggttcayctcttcctggtcccctactaccttgggtgcagcacttctgccagaaccttctgggcgcctgctgctgtgcctgggctccccacgcagggagggacacccc

SEQ ID NO: 49916 - DNA, 201 bp, Homo sapiens
actcctgacctcaggtgatccatccgcctcaacctcccaaaatgctgggattacaggcttgagccactgcgcccagcccataatagttttttttttttttwtaattatttttcatttaacattcagctgttaccaaaatctcatagtgttttaagaaagtttatgaatctgtgttgggccacatgtggcccagagaccatg

SEQ ID NO: 49917 - DNA, 201 bp, Homo sapiens
aactcctgacctcaggtgatccatccgcctcaacctcccaaaatgctgggattacaggcttgagccactgcgcccagcccataatagttttttttttttttataattatttttcatttaacattcagctgttaccaaaatctcatagtgttttaagaaagtttatgaatctgtgttgggccacatgtggcccagagaccat

SEQ ID NO: 49918 - DNA, 201 bp, Homo sapiens
aattctcatgccttggactcctgagtagctgagactacaggcaagtgccatcaggactggctaattttttaaatgtttttagtagagacggggtttcaccrtgttggccaggctggtctcaaactcctgacctcaggtgatccatccgcctcaacctcccaaaatgctgggattacaggcttgagccactgcgcccagccc

SEQ ID NO: 49919 - DNA, 201 bp, Homo sapiens
cctgggccacattggaagaagaattgtcttgggccacacataaaatacactaacattaacaatagctgataagcttagaaaaaaaaaaattgcaaaaaaaatctcataaatttttttttttttttttgagacggagtctcactctgtcactaggctggagtgtagtgcaatggcattatctcggctcactgcaacctctgc

SEQ ID NO: 49920 - DNA, 201 bp, Homo sapiens; identical to SEQ ID NO: 49836

SEQ ID NO: 49921 - DNA, 201 bp, Homo sapiens
tataatcccagccacttgggaggctgaggcgggaggattgtttgagcccaggagttcgaggctttagtgagctatgattgtgcgactgcactccagcctgrgcagcagagcgagaccccatctgtgaaaaaaaacatttagaggatgaggagggagcggggactcagagatactgtccttccagcgagaccaacatgaaag

SEQ ID NO: 49922 - DNA, 201 bp, Homo sapiens; identical to SEQ ID NO: 49838

SEQ ID NO: 49923 - DNA, 201 bp, Homo sapiens; identical to SEQ ID NO: 49839

SEQ ID NO: 49924 - DNA, 201 bp, Homo sapiens; identical to SEQ ID NO: 49840

SEQ ID NO: 49925 - DNA, 201 bp, Homo sapiens
cctgccctcagcagatggtgctgcctcctacttcacggagcaaataacttctgcggctttcctctcaactacaaatctcactgcgcacaggcacgccggcyttcccctttcctttcccctgcctggggaggctggactctcctgtcccgctccctgtggccccgcccctcccctcctcccaccactgcaccttccattgtc

SEQ ID NO: 49926 - DNA, 201 bp, Homo sapiens
tcctagtgccttttctgagtgcgtggaggtgaagtctgtccgataccgcagctttgttccactgagcctgcttatctccaagggcgttcctctccactccrctaaagcagcacacacccatgggcgcccactgccgtcgggaggagctccacctctgaactctcacaattcattcagcatttggccatccatattcttcag

SEQ ID NO: 49927 - DNA, 201 bp, Homo sapiens; identical to SEQ ID NO: 49841

SEQ ID NO: 49928 - DNA, 201 bp, Homo sapiens; identical to SEQ ID NO: 49842

SEQ ID NO: 49929 - DNA, 201 bp, Homo sapiens; identical to SEQ ID NO: 49844

SEQ ID NO: 49930 - DNA, 201 bp, Homo sapiens; identical to SEQ ID NO: 49845

SEQ ID NO: 49931 - DNA, 201 bp, Homo sapiens; identical to SEQ ID NO: 8641

SEQ ID NO: 49932 - DNA, 201 bp, Homo sapiens
acccccgaaacacagaaagaagccttaatcccttgaggctggtgaggccccaagtccacccctcccacaagacaggtcttcagcactgcgctggcctcccrttgggggtctgttcagccactgggaatgtcttccttggctcctctcgctgaccctggctctcctgcacccaggatcctattatgtgtgtctgaggggcag

SEQ ID NO: 49933 - DNA, 201 bp, Homo sapiens
cagggttagtgctggcctgaggagaaagaagtatagcttcctccgccgatggccaatatcagcatgatccagccccacccgcaggctaatttccccctgasccagccagtcttcagttatggaacaatccttctcaaaaacgtagactgggtgtggtggctcaatgcctgtaatcccagcattttgcgaggctgaggcagg

SEQ ID NO: 49934 - DNA, 201 bp, Homo sapiens
ccccatctggtgctttcttgcatctacaccccagggccctgtggtggggctgcagggggaagctgtgcacctgagatgaggctggaacgggaattggcctmtctgctcccttcttcagtaagcaaggagccccgcccctcaggcccagcctctggcaagaggtggtggaatccttgtgccgggtagtagaggaggataagg

SEQ ID NO: 49935 - DNA, 201 bp, Homo sapiens
ctgcaagatgctgacggatgacatgactgaggttttcatagtcactggccatactgtcctggaggtgcgggaggagctcaggtaaacaagaagcccagggraggcggtgctgtgcgttgtgcccagggctcaggtgggggtttctggaccatttagacttgaatccctgctccccactgccgttctggaagaccacaaccg

SEQ ID NO: 49936 - DNA, 201 bp, Homo sapiens
cctgtctctcgagaaaaatccacacacaaagaagaggtccattctgtgtcccatgtcaagaagcagatcctggctgggcgcagtggatcacctgaggtcargtgttcgagaccagcttggccaacatggtgaaactccgtctctactaaaaatacaaaaaatagctgggcgtggtggcaggtgcctgttttcccagctact

SEQ ID NO: 49937 - DNA, 201 bp, Homo sapiens; identical to SEQ ID NO: 49850

SEQ ID NO: 49938 - DNA, 201 bp, Homo sapiens; identical to SEQ ID NO: 49849

SEQ ID NO: 49939 - DNA, 201 bp, Homo sapiens; identical to SEQ ID NO: 49851

SEQ ID NO: 49940 - DNA, 201 bp, Homo sapiens; identical to SEQ ID NO: 49856

SEQ ID NO: 49941 - DNA, 201 bp, Homo sapiens
aattaaatggagagtcaccattgttcacctctagattggacttcttccttccactccacgctccagacccttgtattcaattatccattggacctctccamtaggacgacccaccaccacctgttattcaacataccccacactgaacattgtttttcccaacacctgttgctcctcccgcatcctctatttcagtgagca

SEQ ID NO: 49942 - DNA, 201 bp, Homo sapiens
aactctgtctcaaaaaaaaaaaaaaaaaatggaaccaatagattgaatgtggggtccaaagaagagagagaaatgaatcaagataaaaaacaacaaaaaarcagaaattaaaaaaaaatttttacagaaatgaatcaagatccattgcagggtttttagttggagcaactgaatgggttgtggcatttcctgagttgagaa

SEQ ID NO: 49943 - DNA, 201 bp, Homo sapiens
ctcctgacctcaggtgatccactcacctcggcctcccaaagtgctgggattacaggtgtgagccaccgtgcccagctagcacagagaaatctgaataaagrgaaagggagcctgccatgtggctctctgggaactgtcaatccaggaagaggaaacagcaatataaaggccttcagccctggcctgggaggaggtcttctg

SEQ ID NO: 49944 - DNA, 201 bp, Homo sapiens
gcagtggcatgatcttggctcactgcaatgtctgcctcccgggttcaagcaattctcatgccttggactcctgagtagctgagactacaggcaagtgccaycaggactggctaattttttaaatgtttttagtagagacggggtttcaccatgttggccaggctggtctcaaactcctgacctcaggtgatccatccgcct

SEQ ID NO: 49945 - DNA, 201 bp, Homo sapiens; identical to SEQ ID NO: 49803

SEQ ID NO: 49946 - DNA, 201 bp, Homo sapiens; identical to SEQ ID NO: 49805

SEQ ID NO: 49947 - DNA, 201 bp, Homo sapiens
tacttgggaggttgaggcaggaaaatggcgtgaacccgggaggtggagcttgcagcagtgagccgaggtcgcgccactgcactccagcctgggcgacagarcaaggctccatctcaaaaaaaaaaaaaaaaggccatctatgtgagatagtgaacattaccgtggcttggcatttttgttggcttgtacctagcccaggtg

SEQ ID NO: 49948 - DNA, 201 bp, Homo sapiens
ggaaccagtgctgtagaattcgacctagagtcttctatgtgaagcttggggatacagagatgtataaggtggcctctgcctttagcagcagcagatggatmggtcgaggaggggagatctggacagtgtcagactgagataccatgtgggaggcacagggtgcccggggactgggagagtgtcgctccctaagcaggtagg

SEQ ID NO: 49949 - DNA, 201 bp, Homo sapiens; identical to SEQ ID NO: 49808

SEQ ID NO: 49950 - DNA, 201 bp, Homo sapiens
ttcatacatgtttgtacaaacaaatattaggtcatgctgcagctttttttttttttttttaaatactcctgcccaggttggagtgtagtggtgcgatctcrgctcactgcatcctctacctcccaggttcaagcgatcctcgtgcctcagcctcccgattagctagaattacaggctcccaccaccacacccggctaattt

SEQ ID NO: 49951 - DNA, 201 bp, Homo sapiens; identical to SEQ ID NO: 49813

SEQ ID NO: 49952 - DNA, 201 bp, Homo sapiens; identical to SEQ ID NO: 8650

SEQ ID NO: 49953 - DNA, 201 bp, Homo sapiens
ccaaagcggggccatctaggttgggactcaaaacacaaagaaattctgccacaaaggttcaatgtcactttccttggccccaaaagagaaactggagagaycagagtgctcagattaggtaggcagctgcagcctcccactgtagccaccctgcagagcatgagggagggactcactgataaagcaccaggactacccact

SEQ ID NO: 49954 - DNA, 201 bp, Homo sapiens
ccgattcctcaggctcaacctgaagccggatctctccgacacggtgagaagccaggctacctgctgtgggaggcagagatggggtggctggaaaggcctcrtgtgaacactggggggctctgtggggccatgtggctgttcagtgtgttggtgcttatctgttcttcctggggacagacaccctgtgcagctggccacaga

SEQ ID NO: 49955 - DNA, 201 bp, Homo sapiens
gtgcccagctagcacagagaaatctgaataaagggaaagggagcctgccatgtggctctctgggaactgtcaatccaggaagaggaaacagcaatataaakgccttcagccctggcctgggaggaggtcttctgcacgtggagctggggaggagtggaggaaatgagttggagggtgggggtgtggaatgagtcaggatta

SEQ ID NO: 49956 - DNA, 201 bp, Homo sapiens
gtaaacaagaagcccaggggaggcggtgctgtgcgttgtgcccagggctcaggtgggggtttctggaccatttagacttgaatccctgctccccactgccrttctggaagaccacaaccgtatcatttccacctcgacaggaaagcccgggagaagatgatggactcatcccgctccgtaggcaacggcttcacctatcag

SEQ ID NO: 49957 - DNA, 201 bp, Homo sapiens; identical to SEQ ID NO: 49826

SEQ ID NO: 49958 - DNA, 201 bp, Homo sapiens
atccaggaactcccctcttctctggaaggagtgagccttctgtccctggggctgccctgggcaccacagttctgtttctgggggaaggggcttttagggcrtgcgcctgcctgactatgcctactttctgcagattgggctcgacacaggctactggacggccatcaaccacttcttcatctggggaagccttgctgttta

SEQ ID NO: 49959 - DNA, 201 bp, Homo sapiens
aagctttcttcttccaagctaacttctgtcctggaggccgttgctggggagtacgccctggtcataaatggtcacagcctggtaggcatcgctatccttarcttgggcagtatctttccagtgagcacttctgtccagggcttttatatcttgttctaatttcccctgatttcagagaagactggtctcaaaggggactgg

SEQ ID NO: 49960 - DNA, 201 bp, Homo sapiens
cagcactttgggaagccaaggtgggcggataacgaggtcaggaattcgagaccagcctggccaacatgttgaaaccccgtctctactaaaaatacaaaaaytagccaggtgtggtggtggttgcctgtaatcccagctacttgggaggctaaggtaggagaatcgcttgaaaccggaaggtggaggtagcagtgagccaag

SEQ ID NO: 49961 - DNA, 201 bp, Homo sapiens
gtcctctcctgatgccctgaccctggtctcagctccaggaattaggggagctccttggctgtttgaagtgagacactggcctctgggcatcctggccaggyggaaccctgctagactctcccctgttgctgctcagggtccttgtgagtctgtggaatgtggctgtggttggacttcccagtgtggcccgtggctgtgctg

SEQ ID NO: 49962 - DNA, 201 bp, Homo sapiens
tgggcgtggtggcaggtgcctgttttcccagctactcggggggctgaggcaggagaattgcttgaatccaggaggtggaggttacagtgagccgagtttgygccattgtactccagcctgggcgacaagagtgaaagtctatcaaaaaaaaaaaaaaattagattctgagagtcctccccttgtcctctcctgatgccctg

SEQ ID NO: 49963 - DNA, 201 bp, Homo sapiens
gccacattaattgacagtcagtgtgtgctcatccacacttttcatacatgtttgtacaaacaaatattaggtcatgctgcagctttttttttttttttttwaatactcctgcccaggttggagtgtagtggtgcgatctcggctcactgcatcctctacctcccaggttcaagcgatcctcgtgcctcagcctcccgatta

SEQ ID NO: 49964 - DNA, 201 bp, Homo sapiens
gaaagggtccatcctggccaggcacggtggctcatgcctatagtcatagcactttgggaggctgaggtgggaggattgctcgagcccaggaatgcgagacmagcctgggcaacatagtgagaccacatccctacaaaaaatttaaaaattagccaggtatggtggcatgcacctgtggtctcagctggccagtgactcagg

SEQ ID NO: 49965 - DNA, 201 bp, Homo sapiens
cttataagacaaaccatacagagtgtataagaaaaagtgaatagaggtcggtaccatggctcacgcctgtaatcccagcactttgggaggccgaggtgggyggattgcctgaggccaggagttcgagaccagtctggtcaacatggtgaaaccctgtctctattaaaaatacaaaaattattagctgggcgtggtgctgca

SEQ ID NO: 49966 - DNA, 201 bp, Homo sapiens; identical to SEQ ID NO: 49827

SEQ ID NO: 49967 - DNA, 201 bp, Homo sapiens
agtggaactggggccccacagtttccttaacattggttttttcttccttcctagttgggtctgaggggcctagaagaaagggtccatcctggccaggcacrgtggctcatgcctatagtcatagcactttgggaggctgaggtgggaggattgctcgagcccaggaatgcgagaccagcctgggcaacatagtgagaccac

SEQ ID NO: 49968 - DNA, 201 bp, Homo sapiens; identical to SEQ ID NO: 49828

SEQ ID NO: 49969 - DNA, 201 bp, Homo sapiens; identical to SEQ ID NO: 49829

SEQ ID NO: 49970 - DNA, 201 bp, Homo sapiens
cggggcgttcctctgctggctgtgtgcagccggctccaccttcaggctctccttgccctttcccacccaggtttctgtgcccaggtgtcttctccgttctygtctctccccaggcggagggcctgcagcgaaggcccatgtgggtggggcacctcctcttcttcccgacccaagcctcacctcttgtcccctgtgcagtgt

SEQ ID NO: 49971 - DNA, 201 bp, Homo sapiens; identical to SEQ ID NO: 49830

SEQ ID NO: 49972 - DNA, 201 bp, Homo sapiens
aacgaattccttcgaggcgggggaaggtgtcttacctttcagttttcttcttttcagttccgccacaagagcgataaccaggtgaataaccgccagtctcrggtgctgatcaatggaatgtgagtgcctgttggagacaagagctctggggacgaagggggtcccttaggaacctctttagctcctgacagcctcttcact

SEQ ID NO: 49973 - DNA, 201 bp, Homo sapiens
cgctccctaagcaggtaggcagagagggagagatggcatttgctctgggctttgagtggtgactgggctggatgaaggtggagccacaatggagaggaggmtgagagggctggaagcaaaggtgtggagatgggagcctgggaatggcctatggaaatagttggccagggtcttgggccaagagcaagagctggaaacata

SEQ ID NO: 49974 - DNA, 201 bp, Homo sapiens; identical to SEQ ID NO: 49832

SEQ ID NO: 49975 - DNA, 201 bp, Homo sapiens; identical to SEQ ID NO: 49833

SEQ ID NO: 49976 - DNA, 201 bp, Homo sapiens
tgcaatggcattatctcggctcactgcaacctctgcctctcgggttcacgtgattctcctgcctcagcctccctagtagctgggattacaggtgcccgccrccacacccggctaatttttttgtatttttagtagagatgagagatggggtttcaccatgttggccagactggtctcgaactcctgacctcatgatctgcc

SEQ ID NO: 49977 - DNA, 201 bp, Homo sapiens; identical to SEQ ID NO: 49835

SEQ ID NO: 49978 - DNA, 201 bp, Homo sapiens
gttggcttgtacctagcccaggtgaatagattatttacagtaagttttctggtatgttaaaagtagctcatccccactcttaccaactttgaggactctgraaggtttcaaggtgccagattgagagctaatcaactatttcagtttcttcatcatatagatgaaataatggtcagacagaaggccacatgataattggtg

SEQ ID NO: 49979 - DNA, 201 bp, Homo sapiens; identical to SEQ ID NO: 49837

SEQ ID NO: 49980 - DNA, 201 bp, Homo sapiens
gggaaggcagttctttcagccggggaaggtgtggctggttctccctcctggctgcagctgatctagaactctcttgggttgctgaactaagttagtctggrggtagctggcttgaggttggttctagctgccaaagactttggaaaggaggaggcagggacagagtcagagtctgcccttggtcatccagggtcaaaacgg

SEQ ID NO: 49981 - DNA, 201 bp, Homo sapiens
gggcttttatatcttgttctaatttcccctgatttcagagaagactggtctcaaaggggactgggaggagctgagactcccaggtgtctcctggaaagacyggctctctcaggtttctctgtgctccaggcccacgcactggaggcagacatggagctggagtttctggagacagcgtgtgcctgcaaagctgtcatctgc

SEQ ID NO: 49982 - DNA, 201 bp, Homo sapiens
cttgaatccctgctccccactgccgttctggaagaccacaaccgtatcatttccacctcgacaggaaagcccgggagaagatgatggactcatcccgctcygtaggcaacggcttcacctatcaggacaagctttcttcttccaagctaacttctgtcctggaggccgttgctggggagtacgccctggtcataaatggtc

SEQ ID NO: 49983 - DNA, 201 bp, Homo sapiens
tcgcgatatagacacacgcctccacggaggctccgggcactcgggctccccgttttctcccctctgccgcaggcatccctggtcttccttccctgcgctgmctgagcacctgggctcctgtgggagtggcttccagcccctaggtccccatcgtcctagtgccttttctgagtgcgtggaggtgaagtctgtccgataccg

SEQ ID NO: 49984 - DNA, 201 bp, Homo sapiens
gaggcgggggaaggtgtcttacctttcagttttcttcttttcagttccgccacaagagcgataaccaggtgaataaccgccagtctcaggtgctgatcaayggaatgtgagtgcctgttggagacaagagctctggggacgaagggggtcccttaggaacctctttagctcctgacagcctcttcactgtcttctcgttgc

SEQ ID NO: 49985 - DNA, 201 bp, Homo sapiens
caagaccctgtctcaaaaaaaaatcttattaaaaaaaaaagaacatgctaaatttgtgttatatgaattttacctcaattaaaaaaaaaataggccaggcrtggtagcatgtgcctattatcccagctacttagggggctgaggtgggaggatcacttgaggccaggagttcaagaacagcctgggcaacaaagcaagacc

SEQ ID NO: 49986 - DNA, 201 bp, Homo sapiens; identical to SEQ ID NO: 8676

SEQ ID NO: 49987 - DNA, 201 bp, Homo sapiens
tctccctcccctctgcagtttcgtggtgggctcggacggctacgtgtacgagggacgcggctggcactgggtgggcgcccacacgctcggccacaactccyggggcttcggcgtggccatagtgggcaactacaccgcggcgctgcccaccgaggccgctctgcgcacggtgcgcgacacgctcccgagttgtgcggtgcg

SEQ ID NO: 49988 - DNA, 201 bp, Homo sapiens
agccaatgtggtaaaactccatctccactaaaaatagaaaacttagctagccttggtggtgcatgcctgtagtcccagctactctggaggctgaggcgagrgaatcacctgaacctgggaaaaaagaagagttactaagaaaatcgtatggaagaggaagtatgtttactattcattaagtagaagtgtgtcatcataaag

SEQ ID NO: 49989 - DNA, 201 bp, Homo sapiens
gcacccggccaaggggccttgatttatcctgacaagtgggcctcctgaggttgaaggaaacctggggtagaggtgattcattgtgggatttccagccttcyttctgcctcccaggcccagcccagccctgatgcattggtgtgtgagtgcctgaatgtgggtgtacatgtgtgtgtttcagatcctgaccccaaactggcc

SEQ ID NO: 49990 - DNA, 201 bp, Homo sapiens
acctgtagtcccagctactcgagagcctgaggtaggaggatcgcttgagcccaggaggttgagaatgcagtgagctgtgattgtgccactgcactccagcytggccaacagagcaagaccctgtctcaaaaaaaaatcttattaaaaaaaaaagaacatgctaaatttgtgttatatgaattttacctcaattaaaaaaaa

SEQ ID NO: 49991 - DNA, 201 bp, Homo sapiens
gcctaggcaacagagcgagactctgtctcaaaaaaaaaaaaaaaaaaaaaaaaagcctgtaatcccagcactttgagaggccaagacgggtggatcacccraggttgggagtttgagaccagcctggccaacatgctgaaatcccgtctctactaaaaatacaaaaattaactggaagtggtggacgggcacctgtaatct

SEQ ID NO: 49992 - DNA, 201 bp, Homo sapiens
caaacaaaaaaaacttaaaaaggccaggcgcagtggctcacgcctgtaatcccagcactttgggaggccgaggcgggaggatcacgaggtcagaagattgrgaccatcctggctaacacggtgaaaccccgtctctactaaaaaatacaaaaaaattagccaggcgtgatggcgggtgcctgtagtcccagctacttggga

SEQ ID NO: 49993 - DNA, 201 bp, Homo sapiens; identical to SEQ ID NO: 8685

SEQ ID NO: 49994 - DNA, 201 bp, Homo sapiens
caccacccatctctacaaacaaaaaaaacttaaaaaggccaggcgcagtggctcacgcctgtaatcccagcactttgggaggccgaggcgggaggatcacsaggtcagaagattgagaccatcctggctaacacggtgaaaccccgtctctactaaaaaatacaaaaaaattagccaggcgtgatggcgggtgcctgtagt

SEQ ID NO: 49995 - DNA, 201 bp, Homo sapiens; identical to SEQ ID NO: 8686

SEQ ID NO: 49996 - DNA, 201 bp, Homo sapiens
gattgcgtcactgtacagcagcctggagaagagagtgagagcttgtctcaaagaaaaaaaaagaaagaaaggaagaaagaaagaacgaaagaaagaggaargaagggagaaagggaggaagggaggaaggaaggaaggaaggaaggaaggaaggaaggaaggaaggaaggaaggaaaaaaaaaaaaaaagaaaaagaaaaa

SEQ ID NO: 49997 - DNA, 201 bp, Homo sapiens
  misc_feature (101)..(101): n is a, c, g, or t
ttccttgcgaatttcaggatagttttgtctaattctgtgaaaaatgactttgatattttgatagagattgcattgaatctgtagattgctttgggaaatcngatttctctttttctagaaaatgaggtctcactatgttgcccaggctggtcttgaactcctgggctcaagcaatccacccacctcgcctcccaaagtgtg

SEQ ID NO: 49998 - DNA, 201 bp, Homo sapiens; identical to SEQ ID NO: 8681

SEQ ID NO: 49999 - DNA, 201 bp, Homo sapiens
gtattcccagcactttgggaggctgaggcatgaggattgcttgagcccaggagttcaagacaagcatgggcaacatagtgaggccccatctctacaaaaamcaaacaaacaaaaagttaaaaattagtcaggtagcatgcacctgtagtcccagctactcgagagcctgaggtaggaggatcgcttgagcccaggaggttg

SEQ ID NO: 50000 - DNA, 201 bp, Homo sapiens; identical to SEQ ID NO: 8673

SEQ ID NO: 50001 - DNA, 201 bp, Homo sapiens
taggtggtggactggagaagaacctagattctagaccaggagagtgtgtcgagtaagacttcctggattcaaattctactactggccaggcctgtaatccmagcactttgggagatcaaggcgggcagatcacttgagatcaggagatcgagaccagcctggccaacatggtgaaaccccatctctactaaaaataccaaa

SEQ ID NO: 50002 - DNA, 201 bp, Homo sapiens
aggataagggaaggaatctggggcctggagagcaaaagtagggaaggcttcttggaggaggagacataagagctaggctaggaagaaagagaaatgatttkggggagaagccagaaagggcattttttgcagagaagagcaaagctacacaggttaggtggtggactggagaagaacctagattctagaccaggagagtgt

SEQ ID NO: 50003 - DNA, 201 bp, Homo sapiens
aatgctacaactcatgagagccggccctgctccataatcagtggctactcttgtgacccctctagtctctctgcagcctggaggggccttgattttttttkttttttttttttttgagacagagttttgcttttgttgcccaggatggagtgcaatggcgcgatctcagctcaccgcaacctctgcctcccgggttcaagc

SEQ ID NO: 50004 - DNA, 201 bp, Homo sapiens
caatgctacaactcatgagagccggccctgctccataatcagtggctactcttgtgacccctctagtctctctgcagcctggaggggccttgatttttttwtttttttttttttttgagacagagttttgcttttgttgcccaggatggagtgcaatggcgcgatctcagctcaccgcaacctctgcctcccgggttcaag

SEQ ID NO: 50005 - DNA, 201 bp, Homo sapiens
ggcctcatcccagccttgcttaagatctagggccagaggctctgcctatctgtgccaatgctacaactcatgagagccggccctgctccataatcagtggmtactcttgtgacccctctagtctctctgcagcctggaggggccttgatttttttttttttttttttttttgagacagagttttgcttttgttgcccagga

SEQ ID NO: 50006 - DNA, 201 bp, Homo sapiens
tgccaccatagtgaacgctgtcgactctgacgttgagcccaagcccagccctgccccaagttccttctcctctggcctcatcccagccttgcttaagatcyagggccagaggctctgcctatctgtgccaatgctacaactcatgagagccggccctgctccataatcagtggctactcttgtgacccctctagtctctct

SEQ ID NO: 50007 - DNA, 201 bp, Homo sapiens
atagttagttggtccccagggaggaccaatgtggggtgagactggaccctttccaaatctgagaggaggctgagggatggtctgtatgtgcgctttaatgmgggtggaggaacaggcagagaaacagttcctgaccccagccttcaacccccttgcctgtaggatgcccggccatccacccccgctgccgctggggagcgg

SEQ ID NO: 50008 - DNA, 201 bp, Homo sapiens
agaaagaggaaagaagggagaaagggaggaagggaggaaggaaggaaggaaggaaggaaggaaggaaggaaggaaggaaggaaggaaaaaaaaaaaaaaaraaaaagaaaaaatagagaggtgaacaacccaggtaccgatgcagggaactggaggcagccagggaataatgtgttttcaagcaagtttccactgtaggca

SEQ ID NO: 50009 - DNA, 201 bp, Homo sapiens
ttgagaatgcagtgagctgtgattgtgccactgcactccagcctggccaacagagcaagaccctgtctcaaaaaaaaatcttattaaaaaaaaaagaacaygctaaatttgtgttatatgaattttacctcaattaaaaaaaaaataggccaggcatggtagcatgtgcctattatcccagctacttagggggctgaggtg

SEQ ID NO: 50010 - DNA, 201 bp, Homo sapiens
tgcctctgccacttccttcctgtgtgaccttaggcaggtaacttaacctctctgtgcttcagatgcctcatctgtaaagggacaccatcttagtccctttrtgcttctatataggccagggtacctgaaactgagtaaatttgtaaagaagagaaatttactttcttgcagttctgcaggctaggaagtcccaaatgccag

SEQ ID NO: 50011 - DNA, 201 bp, Homo sapiens
ctgtgtacctcactttcctcatctacacaaggatagtgttgggggtcatggggttatcagatggagggctgggagcattgggtagatgtggaatcaatacraggaggctcaggaatgggtggggctgggctaacacattctttcctcctgcagcctccctgcccctgctcatggactctgtcatccaggccctggctgagc

SEQ ID NO: 50012 - DNA, 201 bp, Homo sapiens
tgtagtataatttgaagtcaggtaatgtgataccaggctcgttttgcttagaattgcttttgctatttgggctcatttttggttccttgcgaatttcaggrtagttttgtctaattctgtgaaaaatgactttgatattttgatagagattgcattgaatctgtagattgctttgggaaatctgatttctctttttctaga

SEQ ID NO: 50013 - DNA, 201 bp, Homo sapiens
ggcatgcagctgtagtcccagctactcaggaggctaaggcgagaggatctcttgagcccaggagttagaggttacagagagctatgatggcaccactgcaytccagcctggatgacagacctcatctacaaaaaataataatattcatattatgtataatgtaatattatttatattactatgtaatataaatattatatt

SEQ ID NO: 50014 - DNA, 201 bp, Homo sapiens
atcccagcactttgggaggctgaggcgaggggatcacctgagctcaggagttcgaaaacaacctgggcaatagagtgaaatctcatctctgcaaaaaaaaattttcaaattatccaggcatagccaggcacggtggctcatgcctgtaatcccagcattttgggatgctgaggagggtggatcgcctgagctcaggagttc

SEQ ID NO: 50015 - DNA, 201 bp, Homo sapiens
cacttgaacctgggaagcagggctgcagtaagccaagattgcaccactacactccagcctgggtgacagagggagaccctgcctcaaaaaataataataawaaaataaaaaataaagctgggtgcagtggctcacgcctgtaatcctagcatttcgggaggccgaggcaggaggattgcttgaggccaagagtttaagacc

SEQ ID NO: 50016 - DNA, 201 bp, Homo sapiens
tggggtctcccgagggcagggaggggaaaaagaaaaaaaaaagttagatatgaggtctccctatgtcacccagactggagtgcactgcctattcacaggcrtgatcacagctcactgcagcctcgaactcctggcctcaagcgatcctcctccctcagcctcctgaatagctcagattactggcattttatggctttggtt

SEQ ID NO: 50017 - DNA, 201 bp, Homo sapiens
aaggatgaataggagttcatctcattttgttttgcttcattatatttatttgcattaatttatggggtacaagtgtaaccttgtttctcgcatagattgcrtagtggtcaagtctgggcttttaggtacccatcactccaataacatacatccacccattaagcaatctgtcatcatcctccctcctctctctccctcacc

SEQ ID NO: 50018 - DNA, 201 bp, Homo sapiens
tgggaggccgagtcgagtggatcacgaggtcaggagattgagaccatcctggctaacacggtgaaaccctgtctttactaaaaaaaaaaaaaaaaaaaaaatacaaaaaattagccgggtatagtggtgggcgcctgtagtcccagctactcgggaggctgaggcaagagcatggcatgaaccagggaggcggagcttgca

SEQ ID NO: 50019 - DNA, 201 bp, Homo sapiens
cgaggcggaaggatcacctgaggtcaggagtttgacaccagcctggccaacatggtgaatccctatctctactaaaaatacaaaaaattaggccaggcacrgtggctcacgcctgtaatcccagcactttgggaggccgagtcgagtggatcacgaggtcaggagattgagaccatcctggctaacacggtgaaaccctgt

SEQ ID NO: 50020 - DNA, 201 bp, Homo sapiens
ggcccagcaggtgtggggaacccttgtccttctacagaggctggagccagtacacctccagcttcagtgcatgagccaagaacagctggcccaggtggctrccaatgctaccaaggaattcactgaggccttcctgggtgaggaagttccccacaccctgtgatccttcccattacagacacagacgcccccaccccgtat

SEQ ID NO: 50021 - DNA, 201 bp, Homo sapiens
gctagccttggtggtgcatgcctgtagtcccagctactctggaggctgaggcgagagaatcacctgaacctgggaaaaaagaagagttactaagaaaatcrtatggaagaggaagtatgtttactattcattaagtagaagtgtgtcatcataaaggtcttcatcttcatcgtcttcatgttgaataggctgagggggagg

SEQ ID NO: 50022 - DNA, 201 bp, Homo sapiens
cagggaagcaatttacatacacaacagcccagtcatgtcaacctgccccatctgatgccagaataaaggggagatgggtccattctgcaggtctcagtcaygggcacccggagaagaggaaggacatttcactgtcagcccaggtgagtccagaagccagctcctggaacaatgccagggtcctgaacactcaagctcaac

SEQ ID NO: 50023 - DNA, 201 bp, Homo sapiens
ccaaggtgggtggatcacctgagctcaggagttcgagaccagcctggccaacatggcaaaaccctgtttctactaaaaatacaaaaaaaaaaaagtatctrggcatggtggcacatacctgtactcccagctactcaggaggctgaggcaggataatcgcttgaacccgggaggtggaggttgcagtgagctgagattgca

SEQ ID NO: 50024 - DNA, 201 bp, Homo sapiens
tcactccaataacatacatccacccattaagcaatctgtcatcatcctccctcctctctctccctcacccttctgaatctccactatctatctttccacaygctacatccatgcatacacattatttagctcccatttataagtgagaacttacggtatttgtctttctgtgtttgacttgtttcacttgagataatggcc

SEQ ID NO: 50025 - DNA, 201 bp, Homo sapiens
aaagaagggagaaagggaggaagggaggaaggaaggaaggaaggaaggaaggaaggaaggaaggaaggaaggaaggaaaaaaaaaaaaaaagaaaaagaawaaatagagaggtgaacaacccaggtaccgatgcagggaactggaggcagccagggaataatgtgttttcaagcaagtttccactgtaggcaagagagctc

SEQ ID NO: 50026 - DNA, 201 bp, Homo sapiens
ctgggaaacgagcttggaggaggacattgtctcttactcccatgggaagtgtcccccattcactctatcacttagcaccctacatcctgagcttccactaygtgcccagcttttttctgggaggtccccagaaagaggacacctgaggaggccccaggggtggcccccaggggaatcccaggcctggctcaggctggacat

SEQ ID NO: 50027 - DNA, 201 bp, Homo sapiens
ggccaacatgctgaaatcccgtctctactaaaaatacaaaaattaactggaagtggtggacgggcacctgtaatctcagctccttgggaggctgaggcagragaatcacttgaacctgggaagcagggctgcagtaagccaagattgcaccactacactccagcctgggtgacagagggagaccctgcctcaaaaaataat

SEQ ID NO: 50028 - DNA, 201 bp, Homo sapiens; identical to SEQ ID NO: 8683

SEQ ID NO: 50029 - DNA, 201 bp, Homo sapiens
taggcaacagagcgagactctgtctcaaaaaaaaaaaaaaaaaaaaaaaaagcctgtaatcccagcactttgagaggccaagacgggtggatcacccaagrttgggagtttgagaccagcctggccaacatgctgaaatcccgtctctactaaaaatacaaaaattaactggaagtggtggacgggcacctgtaatctcag

SEQ ID NO: 50030 - DNA, 201 bp, Homo sapiens
ccactacactgcagcctaggcaacagagcgagactctgtctcaaaaaaaaaaaaaaaaaaaaaaaaagcctgtaatcccagcactttgagaggccaagacrggtggatcacccaaggttgggagtttgagaccagcctggccaacatgctgaaatcccgtctctactaaaaatacaaaaattaactggaagtggtggacgg

SEQ ID NO: 50031 - DNA, 201 bp, Homo sapiens
ggctaacacattctttcctcctgcagcctccctgcccctgctcatggactctgtcatccaggccctggctgagctggagcagaaagtgccagctgccaagrccagacacacagcttctgcgtggctgatgtcagctccaaactctggcccccacaatcgcctctaccacttcctgctgggggcatggagcctcaatgctac

SEQ ID NO: 50032 - DNA, 201 bp, Homo sapiens
gggcccgggtccccctcacgccgcatggtgcttgcttctccctcccctctgcagtttcgtggtgggctcggacggctacgtgtacgagggacgcggctggyactgggtgggcgcccacacgctcggccacaactcccggggcttcggcgtggccatagtgggcaactacaccgcggcgctgcccaccgaggccgctctgcg

SEQ ID NO: 50033 - DNA, 201 bp, Homo sapiens
ctggctaatttttgtatttttattagagatggggtttcacggtgttggccaggctggccttgaactcctgatctcaggtgatccactcacctcggcctccsaaagtgctgggattacaggcctaagccaccacagccagtcccaggcatctttcaaaatacctttccctctaacatccccaatttttaacttcaattcatc

SEQ ID NO: 50034 - DNA, 201 bp, Homo sapiens; identical to SEQ ID NO: 8684

SEQ ID NO: 50035 - DNA, 201 bp, Homo sapiens
tctctccctcacccttctgaatctccactatctatctttccacacgctacatccatgcatacacattatttagctcccatttataagtgagaacttacggyatttgtctttctgtgtttgacttgtttcacttgagataatggcctccagttccatccatgttgctgcaaaagacattctttctttttttttttttttgag

SEQ ID NO: 50036 - DNA, 201 bp, Homo sapiens
gagtctcgctctgttgcccaggctggagtgcagtggcgcgatctcggctcaccgcaagctccgcctcctgggttcacgccattctcctgcctcagcctccygagcagctgggactacaggaacccgccaccatgcccagctaattgttgtatttctagtagagacagggtttcactgtgttaaccagaatggtctcgatct

SEQ ID NO: 50037 - DNA, 201 bp, Homo sapiens
agattgcaccactacactccagcctgggtgacagagggagaccctgcctcaaaaaataataataataaaataaaaaataaagctgggtgcagtggctcacrcctgtaatcctagcatttcgggaggccgaggcaggaggattgcttgaggccaagagtttaagaccaacctggccagcatatcaagactccatctttaaaa

SEQ ID NO: 50038 - DNA, 201 bp, Homo sapiens
ggaggagtcctgataggtagagcaaagttggagaggtggcgtggcttaggctaggggcggggccttaatagggaccgggaatagctaaatcatgggactcsagtcagggtagagaactagtacaggaggcgggatctgggagaggagcgggacctgtggcagagtctgggtctggggccaggcagagatggcctaaaacag

SEQ ID NO: 50039 - DNA, 201 bp, Homo sapiens
tacaggaggcgggatctgggagaggagcgggacctgtggcagagtctgggtctggggccaggcagagatggcctaaaacagacaaggaggcctggtgcggwggctcccgcctgtaatctcaccactttgggaggctgagaagagaggatcgctggagcccaggagttcgagaccagcctgagcaatataggaagacacccc

SEQ ID NO: 50040 - DNA, 201 bp, Homo sapiens
ctctgccagaaagaaagagaaaaagagaaagaaagagaagaaagagaaagaaagaaagaaagaaagaaagaaagaaagaaagaaagaaagaaagaaagaargaaggaaggaaggaaggaaggaaggaaggaaggaaggaaggaaggaaggaagaaagaaagaaagaaagaaagaaaggaagaaagaaagaaagaaaaaaga

SEQ ID NO: 50041 - DNA, 201 bp, Homo sapiens
agtcccagctactcaggaggctgagtagggagaatcacttgaatccgggaggcagagattgcagtgagccaagatcgtgccactgcacaccagcctgggasacagagcgaaactccttctcgataaataaattaattaataataataagagtaataataaatcttgccatcttccagaagccccccttgtaccctcttccc

SEQ ID NO: 50042 - DNA, 201 bp, Homo sapiens
aatctcggctcactgcaacctccacctcccatgttcaagtgattctcccgtctcagcctcccaagtagctgggattacaggcacacaccaccatgcctggstaatttttgtatttttattagagatggggtttcacggtgttggccaggctggccttgaactcctgatctcaggtgatccactcacctcggcctccgaaag

SEQ ID NO: 50043 - DNA, 201 bp, Homo sapiens; identical to SEQ ID NO: 8680

SEQ ID NO: 50044 - DNA, 201 bp, Homo sapiens; identical to SEQ ID NO: 8679

SEQ ID NO: 50045 - DNA, 201 bp, Homo sapiens
gtcactgtacagcagcctggagaagagagtgagagcttgtctcaaagaaaaaaaaagaaagaaaggaagaaagaaagaacgaaagaaagaggaaagaaggragaaagggaggaagggaggaaggaaggaaggaaggaaggaaggaaggaaggaaggaaggaaggaaggaaaaaaaaaaaaaaagaaaaagaaaaaatagag

SEQ ID NO: 50046 - DNA, 201 bp, Homo sapiens
attgtggttttaatttgcatttctctgatgattggtgatgttgagcatgttttcctttgcctattggccatgtgtatatcttcttttgaaaaatgtctattaatgtcttttgcccgctttttagtgggtttctttctttctttctttttctttctttctttctttttctttctttctttctttcttttctttcttgaattg

SEQ ID NO: 50047 - DNA, 201 bp, Homo sapiens
aacaggcagagaaacagttcctgaccccagccttcaacccccttgcctgtaggatgcccggccatccacccccgctgccgctggggagcggcgccttatcrgggccgcccgaagctgctgcagctgccgctgggattcttgtacgtgcatcacacctacgtgcctgcaccaccctgcacggacttcacgcgctgcgcagcc

SEQ ID NO: 50048 - DNA, 201 bp, Homo sapiens
gcactttgggaggccgaggagggcagataacctgaggtcaggagttcgagaccagcctggccaacatggcgaaacaccgtctctactaaaaataaaaattwaaaaaaaaattagatgggcgtggtggcgggtgcctgtaatcccagctactccggaggctgaggcaggagaatcgcttgaacccgggaggtggaggtggca

SEQ ID NO: 50049 - DNA, 201 bp, Homo sapiens
ctgaggtcaggagttcgagaccagcctggccaacatggcgaaacaccgtctctactaaaaataaaaattaaaaaaaaaattagatgggcgtggtggcgggygcctgtaatcccagctactccggaggctgaggcaggagaatcgcttgaacccgggaggtggaggtggcagtgagccgagatcgcgcccttgcacttcagc

SEQ ID NO: 50050 - DNA, 201 bp, Homo sapiens
aatcacttgaatccgggaggcagagattgcagtgagccaagatcgtgccactgcacaccagcctgggagacagagcgaaactccttctcgataaataaatyaattaataataataagagtaataataaatcttgccatcttccagaagccccccttgtaccctcttcccagccaccagtgcctccaaaagaaactgatacc

SEQ ID NO: 50051 - DNA, 201 bp, Homo sapiens
taatgtaatattatttatattactatgtaatataaatattatatttttattttatgagatctatattatttttatagacctcatttataaataataataayaataagggccgggcacggtggcttacgcctataataccagcactttgggaggccaaggcgggcagatcatttcaggtcaggagttcaagaccagcctgac

SEQ ID NO: 50052 - DNA, 201 bp, Homo sapiens
ttaattttattttattttatttattttattttatgatggagtctcactctgtcacccaggctggaatgcagtggggggttcttggctcactgcaacctccrcctcctgggttcaagcagttctcctgcctcagcctcctgagtagctggggttacaggtgtgtgccaccatgcccagctaatttttgtatttttagtagtg

SEQ ID NO: 50053 - DNA, 201 bp, Homo sapiens
gaaagaaagaaagaaagaaagaaagaaagaaagaaagaaagaaagaaagaaggaaggaaggaaggaaggaaggaaggaaggaaggaaggaaggaaggaagraagaaagaaagaaagaaagaaaggaagaaagaaagaaagaaaaaagaaagaaaggagggagggaggaaggggggagggagggaaggaaggaaggaaggag

SEQ ID NO: 50054 - DNA, 201 bp, Homo sapiens
ccaggctggtcttgaactcctgggctcaagcaatccacccacctcgcctcccaaagtgtgggattgattacaggagtgagccaccatgcctgcccccaccyccaatttttttttgggggggacagagtcttgctctgtcacccaggctggtgtgcaatagcacaatctcggctcactgcaacctccacctcccaggctcaa

SEQ ID NO: 50055 - DNA, 201 bp, Homo sapiens
aaggggttggtcttgctgtctgaggggtggcagaggtggaagaggtggaggaggtggaaggggagagaggagaggcagacacactccatgtaacttattgraaaaaatccacgagccaggtgcagtggctcatgcctgtaatcccagcactttgggaggctgaggtggatggatcacctgaggtcaggagttcgagatcag

SEQ ID NO: 50056 - DNA, 201 bp, Homo sapiens; identical to SEQ ID NO: 8675

SEQ ID NO: 50057 - DNA, 201 bp, Homo sapiens
ggctgagggggaggaagggaaggggttggtcttgctgtctgaggggtggcagaggtggaagaggtggaggaggtggaaggggagagaggagaggcagacayactccatgtaacttattggaaaaaatccacgagccaggtgcagtggctcatgcctgtaatcccagcactttgggaggctgaggtggatggatcacctgag

SEQ ID NO: 50058 - DNA, 201 bp, Homo sapiens
atcattctttagtttgttctcactgctgtatgatattctgctgtgcgaagagatcacaatttattccttctcccactaatgggtacttaggctgcttccartgtggggctattatgcattgtgctgggggggcatatctattggacgtctacctagcaatggaattgctgagtcagagaagatccagctagtagtgttagt

SEQ ID NO: 50059 - DNA, 201 bp, Homo sapiens
actcggattgctactgtggtcagacccagggacaggtgagtcagggggcagagtcctgggaccaaacctcttggctctgcagaaggcgtactgctgtcccrtctatgtcttgccctgcatggagtgaggctggagactcaagctctcaaagaagctccagcatggggacatagatattcccagctccacagagtcaaggca

SEQ ID NO: 50060 - DNA, 201 bp, Homo sapiens
tatttatattactatgtaatataaatattatatttttattttatgagatctatattatttttatagacctcatttataaataataataataataagggccrggcacggtggcttacgcctataataccagcactttgggaggccaaggcgggcagatcatttcaggtcaggagttcaagaccagcctgaccaacatggtga

SEQ ID NO: 50061 - DNA, 201 bp, Homo sapiens
ctcctgggttcaagcgattctcctgcctcagcctcccacatagctgggattacaggtacctaccaccatgcccggctaatttttgtatttttagtagagayggggtttcaccatgttggccaggctggtctcaaactcttgatctcaggtgatccacccacctcagcctccaaaattgctgggattacaggcgtgagctag

SEQ ID NO: 50062 - DNA, 201 bp, Homo sapiens
aaaaagccaaagggagatatcgagttaacagagacagaaattgcaagaaacagctaaaacctgtaggtctagggaaacacaaggaaaatgttggaggtccmtacttctaaggtctaaggtaattaaggtaattagactagaccttagaagtgtgggggaaggaagtgcagatggaggatctcttgagcccaggaattcaag

SEQ ID NO: 50063 - DNA, 201 bp, Homo sapiens
taaagtattgttttattccctagtggaagcatttctcccttggtaactaagactccaaatgaacaaaaatcaaagttgcagggatgggagaatttattcchacttctacatcttgattcttggacttgtgtactctgactatgggaaaagcagaattatatattagttgctgattctgagcatataccgcattctaagata

SEQ ID NO: 50064 - DNA, 201 bp, Homo sapiens
ttatcgactatttcatagtccctggaaaccatctctttaaggctaattccttccccactctttgaactcaccaagactattggactaggatctggcctttmtaaaatccattatcaggtggagattttgataaccctggagaaatagaaatccacagacaaaaaataattataaactgaagagtacaattatgctcaaaaa

SEQ ID NO: 50065 - DNA, 201 bp, Homo sapiens
aggtaagagaataggtgtaatctatgcccaatgggtaacagtgtgttgttgagttgtggagggggcttttggttcttgtgcctgtctgggcttccttacgratggttctaaactgtggaaatagaagggccagtgtcatcagtagactctggctgaattgccctggatggttaagatgagacatcatgatttctctttttc

SEQ ID NO: 50066 - DNA, 201 bp, Homo sapiens; identical to SEQ ID NO: 8700

SEQ ID NO: 50067 - DNA, 201 bp, Homo sapiens
atgttccaggtactgctagaccctagtatgtacacagcatcataatccctatcctcatggagcttagactaatgggagagacagatcttaagtaaataatmataatagcttccacttatatgacaattactatatgagaggcactgctataaacactttttattttctgactcatttacccttcacacaaacctgaaagtc

SEQ ID NO: 50068 - DNA, 201 bp, Homo sapiens
gtagaggaaaacaagaagaaaatatgacaagaaaggaaaaagatatgcctaggtacccagtgtttgttttttttttaaccgctaataaggctgcaagcaayatttataacttccttcttctgctaccaattctacattttgttttccacaactagaacctcattgggtcagcattatctatctgctgggatgatgaaaatc

SEQ ID NO: 50069 - DNA, 201 bp, Homo sapiens
agtgtttgccccaacttacagttaaattgagatttcatttgaccattcattccattattccatcaggctggttgcttctgatgatggggtgaatggtaagmtaaatgatgtccatgggcatgaacatattgctatacttctttgtggtgaaataagtttcttggatggaaataattccgtgtttaaaacacgctgatggag

SEQ ID NO: 50070 - DNA, 201 bp, Homo sapiens
ctgatgatggggtgaatggtaagctaaatgatgtccatgggcatgaacatattgctatacttctttgtggtgaaataagtttcttggatggaaataattcygtgtttaaaacacgctgatggagaataaagcattccctaagtccacaattaatggtggcggcagaagcattattaacaggaacatccatatccaaaaata

SEQ ID NO: 50071 - DNA, 201 bp, Homo sapiens
catctttcatgtccctcaagaggatagaatgagtctgatttcatctagtttgagtcacccagagctatgctgttcacttgcctgagggaaaaggaacaggytattctgatctgaccattccttcaaagcctgccagagaagaactgtcccctctctgcacactactagtataagtcctgtggtattagggaaactccaggg

SEQ ID NO: 50072 - DNA, 201 bp, Homo sapiens
cccagcattttgggaggccgaggtgggtggatcacctgaggtcaggagtttgagaccagcctgactaacatggcgaaaccctgtctctactaaaaatacaraaattagctgggtgtggtggcaggcacccgtaatcccagctactgttggtggggtaggggggagctgaggcaggagaattgcttgaacccgagaggtgga

SEQ ID NO: 50073 - DNA, 201 bp, Homo sapiens
ctccaaccctcagtacaattgaaagaaattacctggggaattgtcaacatattgagagattctgagattcatagcaattcttaagagatggaaagtttcayggtagcaaagaacatacacagaaaaggctccccagaatcataatggctcctagaaactttcttggatctgcccatcttgtctgaatatttcctccatctt

SEQ ID NO: 50074 - DNA, 201 bp, Homo sapiens
attagtcaaaatatccagtttcatagaagactgcaacaatctttgatgtcttggtatttgaaagacccttttagtaaggaaaaaacataagtagaagatayatttttacacacttctctgcctggataggaacataagaatgatattttgaatgttctcaatgtacctatttatcagaacctgctttataacagaaaatac

SEQ ID NO: 50075 - DNA, 201 bp, Homo sapiens
aaacaaaaaacagaaggcagactatttggcccccatgagatgaagatatagcatgatctctgtctctctcttctaaagtcagccctagataagctctgaarctgggtttctatgaatcaacaaaaccattagaagtttgagaagttctggcaggaggttgttcagttgtctgaagcagcgtgtttgtggcggggttggtgg

SEQ ID NO: 50076 - DNA, 201 bp, Homo sapiens
gatcacctgaggtcaggagtttgagaccagcctgactaacatggcgaaaccctgtctctactaaaaatacaaaaattagctgggtgtggtggcaggcaccygtaatcccagctactgttggtggggtaggggggagctgaggcaggagaattgcttgaacccgagaggtggaggttgcagtgagccaagatcgtgccactg

SEQ ID NO: 50077 - DNA, 201 bp, Homo sapiens
attttctcattcttatctttttaaatcctattggattaatctaatatttcttatttatcttccctgatagttcttaaattatatattctttaataattctyttagtagtcataattgaggttttatagtctaccttaaattagggcatttatcacctaattagcaatattagaatcttgtaagagtctgactccaggttag

SEQ ID NO: 50078 - DNA, 201 bp, Homo sapiens
ttctgtgctcacttatcttcttcatctctgtgggactatatcacctgttacttcaacacagaaattggcatggcccagactatattttggggtcaagagtrcagggaatattatcaggtcagaagttattagtctgctcatttcaaagccccaggatttgtacattataatttaggaaaactgcctcatcccagtgctact

SEQ ID NO: 50079 - DNA, 201 bp, Homo sapiens
tatcttccctgatagttcttaaattatatattctttaataattctcttagtagtcataattgaggttttatagtctaccttaaattagggcatttatcacstaattagcaatattagaatcttgtaagagtctgactccaggttagaaaagaaatattttgggtggctggcaagatggccgaataagaacagctccggtct

SEQ ID NO: 50080 - DNA, 201 bp, Homo sapiens
cacagaaattggcatggcccagactatattttggggtcaagagtacagggaatattatcaggtcagaagttattagtctgctcatttcaaagccccaggakttgtacattataatttaggaaaactgcctcatcccagtgctacttctctttaagggtttaatggtaaatctcgaataaatcagttgtttggtaatatgta

SEQ ID NO: 50081 - DNA, 201 bp, Homo sapiens; identical to SEQ ID NO: 8703

SEQ ID NO: 50082 - DNA, 201 bp, Homo sapiens
ggtggagattttgataaccctggagaaatagaaatccacagacaaaaaataattataaactgaagagtacaattatgctcaaaaaaaagcactaaattagygtactaaacagtatgtactaactgaagccaaattattagaagtaggaattcaaaacaagaatgaaaatatatttagagataattaaaagtacaagttgaa

SEQ ID NO: 50083 - DNA, 201 bp, Homo sapiens
caaagataacacatctgtgtccctctggattcaatcagaacagctagactaatgctcatgcattcaggaagattgacaatggaggaagattcttggagttwgagcttggtgaactccaggctgaagcactaaggaagtctgcagtgtagggactctgtgggcctgaggaaccaaagaagatcacattggaaatcttttctt

SEQ ID NO: 50084 - DNA, 201 bp, Homo sapiens
agaagtaggaattcaaaacaagaatgaaaatatatttagagataattaaaagtacaagttgaaacaaaaatcatcaaaaagaggtaggaatatttgatatwaagtataatcaataaagaacacaatagatggaatattaaaatagatcttaaaagatgaacaaagataggcagttggaagaacagaatgaggatatcttcc

SEQ ID NO: 50085 - DNA, 201 bp, Homo sapiens
agatgaggtataagccagggcttactcttctggactaactgaatctccagaactctgtgttagagggaggggatcgtgaataaagggctttataaacttcyatagggttcaaaacaatagggcgaaagggattcctgaatactttctgggcacaggtctggaatttatgacataagaagaatttggtggtggggggtccct

SEQ ID NO: 50086 - DNA, 201 bp, Homo sapiens
attttaattgatctcttagtagaatttggcactgaatttgtgcatcatccttgatgtctctgggtgattttttttatgaacctcttaagtaccaaaggtaytggtggcccaaagataacacatctgtgtccctctggattcaatcagaacagctagactaatgctcatgcattcaggaagattgacaatggaggaagattc

SEQ ID NO: 50087 - DNA, 201 bp, Homo sapiens
gattcctgaatactttctgggcacaggtctggaatttatgacataagaagaatttggtggtggggggtcccttaaggcaaaaagtaaaaggattagagtcmcaaagaaaaggagcagagtgaggctcagtaagaaaatcaggtattagggccacaaggctaggcagtattcatacatttgaggagatgttaggggtaagtc

SEQ ID NO: 50088 - DNA, 201 bp, Homo sapiens
aggtaggaatatttgatataaagtataatcaataaagaacacaatagatggaatattaaaatagatcttaaaagatgaacaaagataggcagttggaagawcagaatgaggatatcttccagaatacagtaagaaggaagaggacttagatgggagattttttattattgattcaatttcctcactattcatattttctgt

SEQ ID NO: 50089 - DNA, 201 bp, Homo sapiens
acagctgtgtaaccaccaccataatcaagatataggacatttccataatctcaaaaagcatcctcatgccctttgcaatcaacaccaaacccaacttccawcccctgtaaccactcctctactttctgtcactaagataaattttgactgctatagtatttcaaacaaagagaatcaagcactttttgtgtgtatattctt

SEQ ID NO: 50090 - DNA, 201 bp, Homo sapiens
aatatttgatataaagtataatcaataaagaacacaatagatggaatattaaaatagatcttaaaagatgaacaaagataggcagttggaagaacagaatraggatatcttccagaatacagtaagaaggaagaggacttagatgggagattttttattattgattcaatttcctcactattcatattttctgtttcctca

SEQ ID NO: 50091 - DNA, 201 bp, Homo sapiens
cattgctgtagtaccagttgtgatgtctcctctttcatttctaattttatttttttctctctctctttttcttaatctaaccaaagatttgttgatttttktatctttaaaacaaactcagttttattgattttttctatgtcttttctggtctctattttatttattactgctctgatctttattatttccttccttcta

SEQ ID NO: 50092 - DNA, 201 bp, Homo sapiens
tactaactttggactatgaccatagaacaaaaagttcatagaatacaagttagagaaataggagaaaacatacacatattgaatgtatgaataccaaagayaacgacaaatctttaagcacatctagtgagaaagagccattcatctaccaaggaaattatgcataaagggagaagaatgaaatgccaaagttcaatacct

SEQ ID NO: 50093 - DNA, 201 bp, Homo sapiens
tagaatgcatactgtatgattccatttacatcaatatttaaaataggtggccaggcatggtgtctcatgcctgtaatcccagcattttgggaggccgaggygggtggatcacctgaggtcaggagtttgagaccagcctgactaacatggcgaaaccctgtctctactaaaaatacaaaaattagctgggtgtggtggcag

SEQ ID NO: 50094 - DNA, 201 bp, Homo sapiens
  misc_feature (101)..(101): n is a, c, g, or t
cccaggagaaaagtgctccagaggaagaggaatatgcacagcaacaacagaagaggcctgcatggttggaaggatgttcaaaagtaagttgtgggttgggnaaaagaagaacgggcagaggacgtatacagggacgtatcagccacaggggaaaggagagatcttactttacttttactataggcagtctcatacctggga

SEQ ID NO: 50095 - DNA, 201 bp, Homo sapiens
atgtccccaggaccttaactaaagctcttctcccttcctttatggggggaaataggtagattagagaggaattgagtggatgttcatagaagctttgagawggggtttggaaaatgaggtctgcagacagtgtatctctttttttttccaacagcattatctggatcactttcaatgagaaatgatgcaggtgagtaggaa

SEQ ID NO: 50096 - DNA, 201 bp, Homo sapiens
tcagtgagaattcagcacctacaagcaacatcatgacactgcactagtggctaccaacacccaacttattctttctctttttaaattgtttatttgagaarcacaaaatgtatgtggagaatttcctaaaatatatataaacaatgcaaggaaaaattattagactcatgcacaaaacatttttgaaacaattttactgag

SEQ ID NO: 50097 - DNA, 201 bp, Homo sapiens
gcacaaaatgtatgtggagaatttcctaaaatatatataaacaatgcaaggaaaaattattagactcatgcacaaaacatttttgaaacaattttactgasgtagagattacatatattaaaatgaacacatttaagtgtagatttcattgagttttgacagtgtgcacagctgtgtaaccaccaccataatcaagatata

SEQ ID NO: 50098 - DNA, 201 bp, Homo sapiens
tgcacaaaacatttttgaaacaattttactgaggtagagattacatatattaaaatgaacacatttaagtgtagatttcattgagttttgacagtgtgcayagctgtgtaaccaccaccataatcaagatataggacatttccataatctcaaaaagcatcctcatgccctttgcaatcaacaccaaacccaacttccatc

SEQ ID NO: 50099 - DNA, 201 bp, Homo sapiens
tgtgtgtatattctttccctcagtataatgcttttaccctagaggaaagaaaacacatgttcccacagaaacctagaaaggaatgttcatagtaactttcyttgtaatatcctcaaactagaaagaacacagatattcctctaagggtgaaagggtaaacaaagtgtggtacattcatacaattgaatactattcagcaat

SEQ ID NO: 50100 - DNA, 201 bp, Homo sapiens
agcactaaggaagtctgcagtgtagggactctgtgggcctgaggaaccaaagaagatcacattggaaatcttttctttcttctctacagtagttcttgaayggatacatttttcctccagtcttgattaattcaaactaacatatcaatgcaacttaacaattatttattgatagtacttagtcccaataagtgcaagttt

SEQ ID NO: 50101 - DNA, 201 bp, Homo sapiens
cagtacagtatagtgaaaagaccatagaacctggcatcaaaaatcctgagtggtagaactggaataaatcagactcaggattgacctggccattacctctycccaccaagttgcaaggaagagaaataacagagtcattgatttccctaggagcaggttatgccttccaagaacttccacagagtccccacccctaaccct

SEQ ID NO: 50102 - DNA, 201 bp, Homo sapiens
caatgatttatacttatgtattctctcagctttaatgaatgtcttgttgtagatgactctcaattctacccatccagcccagctttatccttgcattctcytacagtacagtatagtgaaaagaccatagaacctggcatcaaaaatcctgagtggtagaactggaataaatcagactcaggattgacctggccattacct

SEQ ID NO: 50103 - DNA, 201 bp, Homo sapiens
ataggacatttccataatctcaaaaagcatcctcatgccctttgcaatcaacaccaaacccaacttccatcccctgtaaccactcctctactttctgtcastaagataaattttgactgctatagtatttcaaacaaagagaatcaagcactttttgtgtgtatattctttccctcagtataatgcttttaccctagagga

SEQ ID NO: 50104 - DNA, 201 bp, Homo sapiens
caaagccccaggatttgtacattataatttaggaaaactgcctcatcccagtgctacttctctttaagggtttaatggtaaatctcgaataaatcagttgyttggtaatatgtatgcaaacgggagttatcgactatttcatagtccctggaaaccatctctttaaggctaattccttccccactctttgaactcaccaag

SEQ ID NO: 50105 - DNA, 201 bp, Homo sapiens
atctcgaataaatcagttgtttggtaatatgtatgcaaacgggagttatcgactatttcatagtccctggaaaccatctctttaaggctaattccttcccyactctttgaactcaccaagactattggactaggatctggcctttctaaaatccattatcaggtggagattttgataaccctggagaaatagaaatccaca

SEQ ID NO: 50106 - DNA, 201 bp, Homo sapiens
gtcagtgaagggcaaggaaaaggaaaaggaggaagtggaatgctggcttttcaggtgtcgcttggccaaatctaaagcgtggcaacttcaggaatttcagrttgtccccattgtcagattccaggcacccacaggtaagagtgccacacagagtcaattaaaaagaagggaatgaagcaaaaaagcaggtgcacttatctt

SEQ ID NO: 50107 - DNA, 201 bp, Homo sapiens
caagtgatagaaattgttcagtgtaggatgtgccacctccagttcccaggagaaaagtgctccagaggaagaggaatatgcacagcaacaacagaagaggsctgcatggttggaaggatgttcaaaagtaagttgtgggttggggaaaagaagaacgggcagaggacgtatacagggacgtatcagccacaggggaaagga

SEQ ID NO: 50108 - DNA, 201 bp, Homo sapiens
ggacgtatcagccacaggggaaaggagagatcttactttacttttactataggcagtctcatacctgggatggctgattccttcatccccatcatatgccrtaatgaaaattagatggaggtggtcactaaggagggtgggggcctacagctaagggattagcattttgagaagcctgaagaaaacagaggagaataaatc

SEQ ID NO: 50109 - DNA, 201 bp, Homo sapiens
tgaaagtgttgtggggaaaaccatggaacaaaaccaactgtagctctgaagccaactgccactgcccaggtaaaaagctgttgagaggaagaggaagcaawcgggaaaagatgcatcccttgtccagcttgccagtctccctccagcacctcctattggcagaatttaacaaggatctagcttgcaaaaaccaccatcata

SEQ ID NO: 50110 - DNA, 201 bp, Homo sapiens
cagacttctaacccaaaaggggagaggggttctttcctggtagtgccatcttttctcacttctctttcccctctctctggccaagtgatagaaattgttcrgtgtaggatgtgccacctccagttcccaggagaaaagtgctccagaggaagaggaatatgcacagcaacaacagaagaggcctgcatggttggaaggatg

SEQ ID NO: 50111 - DNA, 201 bp, Homo sapiens
ctcatcactaacccagttaacatattcaaaatgattattacataaaaacatctcagttaccaatgaaactcaggatgtgttgctgtatcccctgtgaagcrtagatttatttcttttaaaattaataactgattggaaggtgaatttccattcaaaaatcatcatttttttatttgcaggataacattggagatgcaaact

SEQ ID NO: 50112 - DNA, 201 bp, Homo sapiens; identical to SEQ ID NO: 8704

SEQ ID NO: 50113 - DNA, 201 bp, Homo sapiens
aacatccatatccaaaaatatctgtttattccagtgaggataaattctaaccatgatggaagtcaagctgttagcaactagccatgaattaatgtagatcygtccagactcaatggatgagacacccctgattgtggtttaatgcttggggagtccacctcccagttgttgccagaatatccatttgtaaatgccagtttc

SEQ ID NO: 50114 - DNA, 201 bp, Homo sapiens
cctgtgaagcgtagatttatttcttttaaaattaataactgattggaaggtgaatttccattcaaaaatcatcatttttttatttgcaggataacattggrgatgcaaactaaaagttctcagctataatctaaacatcttctaatcgtacacacagagacataactaagtacctcatcactctcagagatgaggtataag

SEQ ID NO: 50115 - DNA, 201 bp, Homo sapiens
ctgccttaggtttaagattcggctttctattttggaggatagtaaactctctcctcatacacagacttacgagattataagaacagaaggcaggcagggcrcggtggctcacgactgtaatcccagcactttgggaggccgaggcaggcggatcacctgaggtcaggagatcaagaccagcctagacaacatggtgaaatc

SEQ ID NO: 50116 - DNA, 201 bp, Homo sapiens
atgacaatgaagactaagctgcaacgttcattacaatgcactgaatgcatagcaataactgaaggaaattaacagaaaacttaaaatgagatactagatayggctgctcttagaatccacaggttcaataccctggcctgccatcaagtgagaaggatcagcttacctctctccagatgaagtagtcttaaatctctctct

SEQ ID NO: 50117 - DNA, 201 bp, Homo sapiens
gagagaagaggtgcagagatgcccagtaggtgactaggcattagggggacagagtgggcctggaatggctccagtttaagagtgcaggatggaccctgaarggcagactataagaacccaatacaagagtaaatctcaggcacatttcagatgtgttttctttctcttgccagtacagtcaatgaaatagttgctgtgaaa

SEQ ID NO: 50118 - DNA, 201 bp, Homo sapiens
ctctcctcatacacagacttacgagattataagaacagaaggcaggcagggcacggtggctcacgactgtaatcccagcactttgggaggccgaggcaggyggatcacctgaggtcaggagatcaagaccagcctagacaacatggtgaaatcccatctctactaaaaatacaaaaattagctgagcatggtggcacgtgc

SEQ ID NO: 50119 - DNA, 201 bp, Homo sapiens
aagagtaaatctcaggcacatttcagatgtgttttctttctcttgccagtacagtcaatgaaatagttgctgtgaaaaacaattttcctggtaagtatgargaggacctgtctgatcacctcagtcttgataatgtttcacttttccttattcctccaccttctttcccctcccatttttcaggctaaaattcctgagacc

SEQ ID NO: 50120 - DNA, 201 bp, Homo sapiens
gggaggccgaggcaggcggatcacctgaggtcaggagatcaagaccagcctagacaacatggtgaaatcccatctctactaaaaatacaaaaattagctgrgcatggtggcacgtgcctatagttttagctactcaggaggctgaggcaggagaattgcatgaacctaggaggcggaggttgcagtgagccgagatcatgc

SEQ ID NO: 50121 - DNA, 201 bp, Homo sapiens
ggttgcagtgagccaagatcgtgccactgcattccagcctgggcaacagagtgagactccatctcaaaaataaaaaataataaagcaggcaaaaatatagygtggtaaaactacaaaagaaaacaatggttagaattcataaaagaaagaatagtgtttcccaccagacaaggaaaaaagaatgtatttagagaggaccac

SEQ ID NO: 50122 - DNA, 201 bp, Homo sapiens
gctccccagaatcataatggctcctagaaactttcttggatctgcccatcttgtctgaatatttcctccatctttcatgtccctcaagaggatagaatgastctgatttcatctagtttgagtcacccagagctatgctgttcacttgcctgagggaaaaggaacaggctattctgatctgaccattccttcaaagcctgc

SEQ ID NO: 50123 - DNA, 201 bp, Homo sapiens
actttcttggatctgcccatcttgtctgaatatttcctccatctttcatgtccctcaagaggatagaatgagtctgatttcatctagtttgagtcacccaragctatgctgttcacttgcctgagggaaaaggaacaggctattctgatctgaccattccttcaaagcctgccagagaagaactgtcccctctctgcacac

SEQ ID NO: 50124 - DNA, 201 bp, Homo sapiens
actctcagagatgaggtataagccagggcttactcttctggactaactgaatctccagaactctgtgttagagggaggggatcgtgaataaagggctttayaaacttccatagggttcaaaacaatagggcgaaagggattcctgaatactttctgggcacaggtctggaatttatgacataagaagaatttggtggtggg

SEQ ID NO: 50125 - DNA, 201 bp, Homo sapiens
aacttccatagggttcaaaacaatagggcgaaagggattcctgaatactttctgggcacaggtctggaatttatgacataagaagaatttggtggtggggsgtcccttaaggcaaaaagtaaaaggattagagtcacaaagaaaaggagcagagtgaggctcagtaagaaaatcaggtattagggccacaaggctaggcag

SEQ ID NO: 50126 - DNA, 201 bp, Homo sapiens
tcagggaaatgagaggaaggaaaggaagacttctgtccgtgaatatgctcaacacaaaaatcgatgctgtcatgtgtgcgtgtgtgtgtgtgtgtgaataygcatgtgcatatgtgtgcacaagtgtgtatgtagtacattaatacttcatggtgttattttaaaacttcatcagggtagtcagtgccaggtcaggagtta

SEQ ID NO: 50127 - DNA, 201 bp, Homo sapiens
cctcatgggaaccctctgtctgcctctgagcctaacctttctgtgccctctcttctccattcctagaggtatgtattttttaagtctgcgttcagccttcyttttgcctttctgcattccaatgatttatacttatgtattctctcagctttaatgaatgtcttgttgtagatgactctcaattctacccatccagcccag

SEQ ID NO: 50128 - DNA, 201 bp, Homo sapiens
tttgaaaattattcatttcctctggattatccaatatgctagtgtataattgtttatagtagactcttactaacctttgcattgctgtagtaccagttgtratgtctcctctttcatttctaattttatttttttctctctctctttttcttaatctaaccaaagatttgttgatttttgtatctttaaaacaaactcagt

SEQ ID NO: 50129 - DNA, 201 bp, Homo sapiens; identical to SEQ ID NO: 8705

SEQ ID NO: 50130 - DNA, 201 bp, Homo sapiens
cttctaccaggggtatgtcatgtccccaggaccttaactaaagctcttctcccttcctttatggggggaaataggtagattagagaggaattgagtggatkttcatagaagctttgagatggggtttggaaaatgaggtctgcagacagtgtatctctttttttttccaacagcattatctggatcactttcaatgagaaa

SEQ ID NO: 50131 - DNA, 201 bp, Homo sapiens
ttttgaaaattattcatttcctctggattatccaatatgctagtgtataattgtttatagtagactcttactaacctttgcattgctgtagtaccagttgygatgtctcctctttcatttctaattttatttttttctctctctctttttcttaatctaaccaaagatttgttgatttttgtatctttaaaacaaactcag

SEQ ID NO: 50132 - DNA, 201 bp, Homo sapiens
attcctccaccttctttcccctcccatttttcaggctaaaattcctgagaccataaacctcaatcactctcttggcttagtgtatttccacagaggaagakgttcacgcttgatgggctctggcaaagccctgtggctctaggcagacttctaacccaaaaggggagaggggttctttcctggtagtgccatcttttctca

SEQ ID NO: 50133 - DNA, 201 bp, Homo sapiens
catataactaaataccataatatattgcaaaaaagtaaagctttatacaaaaacatgaataattcctagaatgcatactgtatgattccatttacatcaayatttaaaataggtggccaggcatggtgtctcatgcctgtaatcccagcattttgggaggccgaggtgggtggatcacctgaggtcaggagtttgagacca

SEQ ID NO: 50134 - DNA, 201 bp, Homo sapiens
acctacaagcaacatcatgacactgcactagtggctaccaacacccaacttattctttctctttttaaattgtttatttgagaagcacaaaatgtatgtgkagaatttcctaaaatatatataaacaatgcaaggaaaaattattagactcatgcacaaaacatttttgaaacaattttactgaggtagagattacatata

SEQ ID NO: 50135 - DNA, 201 bp, Homo sapiens; identical to SEQ ID NO: 8706

SEQ ID NO: 50136 - DNA, 201 bp, Homo sapiens
accgtcaataatttttatgtaaaataataaaagggtagaggaaaacaagaagaaaatatgacaagaaaggaaaaagatatgcctaggtacccagtgtttgttttttttttaaccgctaataaggctgcaagcaatatttataacttccttcttctgctaccaattctacattttgttttccacaactagaacctcattggg

SEQ ID NO: 50137 - DNA, 201 bp, Homo sapiens
caggaacatccatatccaaaaatatctgtttattccagtgaggataaattctaaccatgatggaagtcaagctgttagcaactagccatgaattaatgtaratctgtccagactcaatggatgagacacccctgattgtggtttaatgcttggggagtccacctcccagttgttgccagaatatccatttgtaaatgccag

SEQ ID NO: 50138 - DNA, 201 bp, Homo sapiens
aggcggatcacctgaggtcaggagatcaagaccagcctagacaacatggtgaaatcccatctctactaaaaatacaaaaattagctgagcatggtggcacktgcctatagttttagctactcaggaggctgaggcaggagaattgcatgaacctaggaggcggaggttgcagtgagccgagatcatgcctctgcactccag

SEQ ID NO: 50139 - DNA, 201 bp, Homo sapiens
taggcagacttctaacccaaaaggggagaggggttctttcctggtagtgccatcttttctcacttctctttcccctctctctggccaagtgatagaaattrttcagtgtaggatgtgccacctccagttcccaggagaaaagtgctccagaggaagaggaatatgcacagcaacaacagaagaggcctgcatggttggaag

SEQ ID NO: 50140 - DNA, 201 bp, Homo sapiens
tggtggcattgttggccataacctcagtgtattagagagctgtttaaattctgtgctcacttatcttcttcatctctgtgggactatatcacctgttactycaacacagaaattggcatggcccagactatattttggggtcaagagtacagggaatattatcaggtcagaagttattagtctgctcatttcaaagcccca

SEQ ID NO: 50141 - DNA, 201 bp, Homo sapiens
tcaaaaaaaagcactaaattagcgtactaaacagtatgtactaactgaagccaaattattagaagtaggaattcaaaacaagaatgaaaatatatttagakataattaaaagtacaagttgaaacaaaaatcatcaaaaagaggtaggaatatttgatataaagtataatcaataaagaacacaatagatggaatattaaa

SEQ ID NO: 50142 - DNA, 201 bp, Homo sapiens
tgcacagcaacaacagaagaggcctgcatggttggaaggatgttcaaaagtaagttgtgggttggggaaaagaagaacgggcagaggacgtatacagggaygtatcagccacaggggaaaggagagatcttactttacttttactataggcagtctcatacctgggatggctgattccttcatccccatcatatgccgtaa

SEQ ID NO: 50143 - DNA, 201 bp, Homo sapiens
atgaacaaagataggcagttggaagaacagaatgaggatatcttccagaatacagtaagaaggaagaggacttagatgggagattttttattattgattcmatttcctcactattcatattttctgtttcctcatgattcagttctaggaggttggattttttttgaaaattattcatttcctctggattatccaatatgc

SEQ ID NO: 50144 - DNA, 201 bp, Homo sapiens
aggggaaaggagagatcttactttacttttactataggcagtctcatacctgggatggctgattccttcatccccatcatatgccgtaatgaaaattagayggaggtggtcactaaggagggtgggggcctacagctaagggattagcattttgagaagcctgaagaaaacagaggagaataaatcaaggtaagagaatag

SEQ ID NO: 50145 - DNA, 201 bp, Homo sapiens
tttactataggcagtctcatacctgggatggctgattccttcatccccatcatatgccgtaatgaaaattagatggaggtggtcactaaggagggtggggrcctacagctaagggattagcattttgagaagcctgaagaaaacagaggagaataaatcaaggtaagagaataggtgtaatctatgcccaatgggtaacag

SEQ ID NO: 50146 - DNA, 201 bp, Homo sapiens
ggctctccttactgccctaccccaaatgatcattttagactgctccatcactgcatttcttttgggaagcccccagcttgcaacatcttccagttctttayatttgaataacggagctttgaactacacaagattatttctatatgttggtgtggtctggagaaaagttttttagcagaactttcatggccaggcttcctg

SEQ ID NO: 50147 - DNA, 201 bp, Homo sapiens
ggaggcggagcttgcagtgagccgagatggcgccactgcactccagcctgggcgacagagcaagactccgtctcaaaaaaaaaaaaaaaaaaaaaagaacyatccacaatgacagtgaaacttcgagtgcttaaataacctgcccaagctctcatgagcagtaaacatagaagcagaattctaatccaaatgggtttattc

SEQ ID NO: 50148 - DNA, 201 bp, Homo sapiens
gcgtcctgttgtagacaggcagcctaccataggccagcatcctccacgggccagcgtcctgttgtagacaggcagcctaccataggtcagcatcctcccaygggccagcgtcctgctgtagacaggcagcctaccataggtcagcatcctcccacgggccagcgtcctgctgtaggcgggcagcctaccataggtcagcat

SEQ ID NO: 50149 - DNA, 201 bp, Homo sapiens
gggttatggtttagatgtgagccatagttgttctgtctcgatttctgcctagctcctgttcaggtgaagctgagaggcagaaatggatcaagccttaagcrgatgcccaagatcaaggcactggcaggttcagtgtcttgcaaaggctcactctctgcttctaagatggtgccttgttgctgtatctcatagaggggacaa

SEQ ID NO: 50150 - DNA, 201 bp, Homo sapiens; identical to SEQ ID NO: 8721

SEQ ID NO: 50151 - DNA, 201 bp, Homo sapiens
gtcatgccatatttctgcatttattttttgctagcattaaatttttcgtatttaaatgatgctgtatagaatatgagataatctgccaattgctatgataytgcttgcttacaatattcagtttttgttgatagctttaaagtatattgcacacttgtcatctagcacactaataaataactatttttgaaaggatacact

SEQ ID NO: 50152 - DNA, 201 bp, Homo sapiens
cagagcctccaaagggatgagatgcaggtcagtgctgcatagggaggggaagggggccccttctctgagacgctggggctggagccaccccagaggagacwtgaccccaggctcagggaccagaggatttctgggctccagtctatcaggaagtgacttagcctcgcctgtaaaacggtgataatgaggggtcactatgat

SEQ ID NO: 50153 - DNA, 201 bp, Homo sapiens
aaacaataacataccatttcacaccaactggactagcaaaaatggtaacattcaacaatgatcaatgttgaaaaggattgagcaacaggattgctcacacyttgaaggaggtagtacatagccatataacctgttttaaatcctacaagaagacctcagagaaactattccttatgggtacatggaaataataaacaagaa

SEQ ID NO: 50154 - DNA, 201 bp, Homo sapiens
ctagcaagaaagcttggagactaaagtagcaaaaagagcttctattaatgcttcctaaaacaatggcaggaaatcaattccatggggcttaactgatgcargcctggaggcactaaaacccattttgcctggtgaagtgagcattttgtgggtcaccaacagttcatcatgatccatttggattggccaagctatgtttaa

SEQ ID NO: 50155 - DNA, 201 bp, Homo sapiens
ttcagtgatgtatgccattatttctaagggcacaaatcaaccactataaacatcacccagctcaataaggagaacatgactaacacccccaaaggcccccygccgtgaccactgccattaacatccccatgccagcgtagccatattcttacttctaactccatagcttaacttgcctgttccatacttactagaatcata

SEQ ID NO: 50156 - DNA, 201 bp, Homo sapiens
atgtggaaagtgcccctgagatggctccatggcattggcataatatcacattccctcttcatgtttgggtcaactgtattttttgtttgtttgtttgtttktttgagacagggcctcactttgtcacccaggctggagtgcagtggcgtgatcacagctcactgcagccttgaacttctggtctcaataatcctcctgcct

SEQ ID NO: 50157 - DNA, 201 bp, Homo sapiens
agtgccgtccaggaagttaggaagctctcccctgaacgaggtttgctgcatactgaaaatactaaatgtttggaggaatccatggaatcaaaacctctgarcctggacatcatttttttaaccatccccaggtgattccaatgtgcagacaaggttgagaaccactgtcccagactaccaatgttctcaaacatcactgta

SEQ ID NO: 50158 - DNA, 201 bp, Homo sapiens
ttacctttaaaagctcttaatcatttttccttgaagacaaagacttgatggtaggcagaattgtaaaatgcccccctaagatttccaccctctgctgtaarcactctgtatagtccctctcttgagtatggcaggacctgtgaatatgatgagatatcactcttacaattaggttattagattgcattatatggcagagtt

SEQ ID NO: 50159 - DNA, 201 bp, Homo sapiens
aagccctgggcagaggtgtgggtacagacagctgcagcttaccagggacatgagggtttcaggctgaagggggatgtagcaacgtctgccccagagatgcyttggaaattcattaaaggttaaaataaatagacatgttctatgttgaaaaaactccttgtggttactgatttattttcagtgaggattgaaaactctacc

SEQ ID NO: 50160 - DNA, 201 bp, Homo sapiens
aaaactgcacccctttctttcaccatatgcaagaatgaactcaatatagattgaagatttgaaagtaagacatcaaacaataaaaactctagaagaaaacytaggaaatgccattccagacataggtcttggtaaagatttcatgatgaagactccaaaagcaatcacaacagaacaagaattgacaggcggacctaatta

SEQ ID NO: 50161 - DNA, 201 bp, Homo sapiens
cacacaggcggcatggaggaagagtcatgcaggtccccatgaaaagatatctgacttgagatcactcccatttgatagcagtagcatttgctgttgagaargcattcagaagtattcccatcccccaaactaactatagctttattgttgaatctgtttctctgctctgtgtcctacacgcctataattttccccttttga

SEQ ID NO: 50162 - DNA, 201 bp, Homo sapiens
ttgactacccatctattaggcagattttggagacaacctctttgtcctcctaactgtgcaatggaattaggcttctcccttatcgacaatgaccccatacytaacttcagccttcctggaactccctttttatctgaacacttctcctggccctgatgaagaatgcagtccagaaggaaagccagtgaactttaaggtcag

SEQ ID NO: 50163 - DNA, 201 bp, Homo sapiens
tggtatacagggtggaatatttaaccgtaaaaaggaaggaaattctgacacatgccacaacatgatgaaccttgaagacattgtgcttaagtaaaataagscaggcaccaacagtcaaatactgtatgattccacttatataacctaattcgagaaatcaaattcataaagacagagtgtagaaaggtggattccagggct

SEQ ID NO: 50164 - DNA, 201 bp, Homo sapiens
ggtttggctctgtgtccccacccaaatctcatcttgaattgtactcccataattcccacatgttgtaggagggaccaagtgggaggtaattgaatcatgarggcagtttccccatactgttctcgtgataatgaatacgtctcatgagatctgatggttattataagggggagttttcctgcacaagctctctttttttgc

SEQ ID NO: 50165 - DNA, 201 bp, Homo sapiens
agttaggaaatttcccactgtcctatgcactgttctgcacacagtaggaaatttcccaattaggggccaggtcagatgattttttttgttattctgataayattcttctcttctagactatgagaagagaggtgctgtagtggtggagaagcgagtgtgtgtgtccccaagaatattttaggtatggccaccaagttagcc

SEQ ID NO: 50166 - DNA, 201 bp, Homo sapiens
atattatattaaatataatatatattatatataatatatattatatttaatataatatatattatatataatataatatatattatattatatataatatratataatatatattatataatatattaaaaatatatactttttttttgagatggagtctcactctgtcacccaagctggagtgcagtagtgccatctcag

SEQ ID NO: 50167 - DNA, 201 bp, Homo sapiens
ccctgtagctcctagagcatccaggggcagaggagaggccttccctaaaaacccttgggtcacgctgagcctctgtcttggcttggtgcagttgcttgcaraattaatactgtatctcattcaattaatgcatgcctcattcctcttgagcttaacaagattaaaagaatgtcgggtgcctggtccctgaatatgaatgag

SEQ ID NO: 50168 - DNA, 201 bp, Homo sapiens
gagggtggattctttcttgtctgctcaagcataggagcaagtggggtcatgcaattttattttataactagtggctaagcatccacttatcttatggaagraggtcctcaattctccaagaaccctggtgcttcagagtcagcagtgccattagcaaccacaggtggcgctgtcctttctcaggagagcaccaatcctaca

SEQ ID NO: 50169 - DNA, 201 bp, Homo sapiens
gagaacagaacacccttggggaagacaagttactatttcaaaatagtatctctgaaaaaaacagaaatccaaatatcgcatgggaagtcagtgggagaaargccaaatctgagagggtctcccaggaacacggattgcgggccagatacagaattaaacttttaaagtgaatgaaagcaatctggggtctaagtggggaag

SEQ ID NO: 50170 - DNA, 201 bp, Homo sapiens
ggtgggatacaccccgggatgcttctgttgtcctaaaatgattggaacatctctcttcatgtgtgaccttctgcaatagggcctggctcctcctctatccrtaggtagagtctatttattcacccatgtgaaggctctgtaacattttatctggtagaacgtggtgggagtgatactgggccaattctgggcatagccagc

SEQ ID NO: 50171 - DNA, 201 bp, Homo sapiens
atagttattaaatgcaccagctgctgggccaagcataccacatgcattcatttctttagtccttacattgttctcacccccagttgatcaaaaaggaaaaytagcacagagtccaagcaacttgcctgaagtcttgcaggcagttatcagggtggttgggactcaaatgcctgtctttgactccacagacctacgtttgta

SEQ ID NO: 50172 - DNA, 201 bp, Homo sapiens
ggcggagagaatctctgacatagaaataagattagcttctccaccatggtaaccctgctgctgactcccaacctacgggaaattatttttcacaaagaaakaatctttaattactaaccaataattaaaacctgaagccaagaacaggaagccagactttggctcttagcaatgttccttaacatcaccgggagtattatg

SEQ ID NO: 50173 - DNA, 201 bp, Homo sapiens
gtacctggggtatgcacactagaccaaggaaggcaaggagaatctgatgcaggtgtgaatgtaaaggcaaggctccatggaaaaggaaagggaatcaaagratgtgcagaaagttaaaaaatgggggaaagaatagaaggtatttggggagcaggaggagagtggacaccacatgaacaaaggcaaggagaagagaaggag

SEQ ID NO: 50174 - DNA, 201 bp, Homo sapiens
gtgctagcctggaaataaaacaccacccatataggaatgcaatagctagaaaaagcaagtcagccctaaaaaattagagaaagaaagatacttaaatgcakttaaagaatgcagctcaccacatgggggatgaacttgttttcttgggtcgatacagcatatgaattcatctagaagcttcatcaatacgatactagacaa

SEQ ID NO: 50175 - DNA, 201 bp, Homo sapiens
aaagatagtgatctagttataagatattaggggattgaaactatgtttgcatatttacagaaaacagaaaacacaaagtgtttataccaaaaaaaaaaaaatggagaggaaacactataggtaggttgggagggacacccaaaagtactgtttcatggaagatgtggcctttgagctggtcctgaaatattagatggctat

SEQ ID NO: 50176 - DNA, 201 bp, Homo sapiens
attttttttgggggggggggttgtgtttttgttttttgttttttgtttttttgagacagagtctcactctgtctcccaggctggagtgcagtggttccatstcagatcactgcaacctccgcctcccaggttcaagcagttctcctgcctcagtctcctgagtagctgggattacaggtgggcaccaccaagcctgtctac

SEQ ID NO: 50177 - DNA, 201 bp, Homo sapiens
caactagttgaatgccattgatttcttagaggaattaaccaaataccttctctgggtccctaagatgcattgatctcctgctttcctccccagcactgtgygaatgtcactgaatgatgggaggctgtttaaatgggtagaaatattgattttcttttctacctttttgaaagttctttgcttaccaggtgctgagcaaac

SEQ ID NO: 50178 - DNA, 201 bp, Homo sapiens
tagcaagaaagcttggagactaaagtagcaaaaagagcttctattaatgcttcctaaaacaatggcaggaaatcaattccatggggcttaactgatgcaggcctggaggcactaaaacccattttgcctggtgaagtgagcattttgtgggtcaccaacagttcatcatgatccatttggattggccaagctatgtttaaa

SEQ ID NO: 50179 - DNA, 201 bp, Homo sapiens
cttgaacctgggaggccaaggttgcagtgagccaagatcatgccattgccctccggcctgggcaacaagagcgaaactctgtctcaaaaaaaaaaaaaaaagaatacttttctctatctaattcttactttagggaaactcactttgagtcatcaccaaagcctgtctgttcagtgcaaccataagtaaatgctctcataa

SEQ ID NO: 50180 - DNA, 201 bp, Homo sapiens
caactcaacatgatcaagtccaaagtcaagagtaggttagtacctccacccacaatgggtacagcaaaggatgaaaattcaaagccaacgagcaatctacytcaatattagaggtcaggtgaatgataagaagcatttagagaagcaaacagccaaatggcaatcaagccctccatcagcgtgtatgttgtatgcctttga

SEQ ID NO: 50181 - DNA, 201 bp, Homo sapiens
ctctgaagaatcaccctcaggggctatggaaacctggctgaaataagaatacataaaacccatgctcctgcctccaagcaggacaactgtgtggtggcgtwgatgctccaaagccagcatggcctgtgacccccaggcacaccccagtgtccaaggcttctaggaaaatgtgtgattcttaacacaagtttgtgtgtttgt

SEQ ID NO: 50182 - DNA, 201 bp, Homo sapiens
atgtttttctcaagccaccaggggcctagcccaggcatattcctctcgctgcaatgacagaagcaaaagaggtcaagtggaatcacaggagtcctcttaargcctaagcttagtcatggcccactatctcttctgcccccatgccattagccaacacaactcaacatgatcaagtccaaagtcaagagtaggttagtacct

SEQ ID NO: 50183 - DNA, 201 bp, Homo sapiens
tctatgattgaatttcatcggagggatccagtcccactggtaaaagttcactattccaaataattaaaatttttctttttctatcccaatagtcatgacaygaaatgagtattagccaagaggctattttagaccaggttaaaattataacctcctttacccatcttcgctataataactgggtattttctctaagtcaat

SEQ ID NO: 50184 - DNA, 201 bp, Homo sapiens
atggttatatatttttaatatataatataatatatattatattaaatataatatatattatatataatatatattatatttaatataatatatattatatwtaatataatatatattatattatatataatatgatataatatatattatataatatattaaaaatatatactttttttttgagatggagtctcactctgt

SEQ ID NO: 50185 - DNA, 201 bp, Homo sapiens
gaggcaggagaatcccttgaaccagggaggcagatgttgcagaatcagggaggcagaggttgcagtgagccaagatcgcaccactgcactccagcctgggygacagagtgagacttcatctcaaataaaaatacataaattaaaataaaataaaataaaataaagaattattttgctgccaagaacagaagtaataatcac

SEQ ID NO: 50186 - DNA, 201 bp, Homo sapiens
cacactgttacttcctctgtacttgactacttttcaattttaattgatagaggtggggtttttatgctttgctttcagccaccctcctccacagtctacawtttatgactcagcttaaaaggaatggttctcaccacatagaaatggggtgattttggccccaggggacacttggcaatgttgggagacagtcatgattgt

SEQ ID NO: 50187 - DNA, 201 bp, Homo sapiens
ctgggtaactaatgcagaaaatgaatttattacaagggcatctctcacagaatcagattagcaagatgggaaccaggctgatttagagacgagtaaccaargccctaccataagaaccatcgacttaggacactcctgcagaccctagcccaccttggtcctgatcaccctcttcctgctgccagattccacaacccagat

SEQ ID NO: 50188 - DNA, 201 bp, Homo sapiens
atatttataagataaaattacaaaagtattaggcaaattaattaacaatatgcatctacatggttaatctatttggaatttatttttgtgtatggtgtgayacaggaatttcttttgtagttagctaattgactcaatatcacttactgattaatttatctagacctgattgtttgaatttattatatacaaatggtttaa

SEQ ID NO: 50189 - DNA, 201 bp, Homo sapiens
ccatctccaaataaactacttgctctcaaatcccagtgtcagagtctgattctaagtgaatctagagtgctggcaacccagaatccttttccaggattcargatggaatcttacaggagatacacagtcctataaaaagttagaataataacgcagcatcaatttgtgcttgatcattaagctaataatgcctcctttctc

SEQ ID NO: 50190 - DNA, 201 bp, Homo sapiens
tgaacagttataatcgtatgtctatctagctactgaatatttctaagataacgttttgtgaggcaaaagtggtttgaagttggtgatgcctcaaaaaaaawtttttttaatactctttagaactctttctgggtattttaaaattggtttagctatttttcctttttgatgcctattgacatgtttgtgatcacatctctt

SEQ ID NO: 50191 - DNA, 201 bp, Homo sapiens
tgaaatataacagtgaacaagacaaagtcctcctcccagggggcttgtatactagtggcaatgaaggagagaaacaaaaaacagatgaccaagcaattgtrtgaatggtggtcaaaatgctatgagaatgagtagagcagagtatgggaagagggagagccatagaggggtgtttctattttataaaaagcatccaggttt

SEQ ID NO: 50192 - DNA, 201 bp, Homo sapiens
ctagtttcattcttctgtatgtggatatccagttttcccagcatcgtttattgaagaaactatcgtttccccaacgtgtgttcttggcaccttcataaaaratgatttggctataaatgcatgaatttatttctgggttctgtattctgttccattggtctatgtgtatgttttatgtccatcaacaggttagtggacaga

SEQ ID NO: 50193 - DNA, 201 bp, Homo sapiens
agccaggaaggtcttgatctcctgaccttgatatctgcccacctcagcctcccaaagtgctgggattacaggcgtgagccaccgcacccagccttcattcytaattttttaaaacgtatttattataaaagaatgttgtattttgtcacatgtttttctgcattgggatgttcatgtggtttttgttatttattctattga

SEQ ID NO: 50194 - DNA, 201 bp, Homo sapiens
gctcttgaaaccccaaagtcttaccctgtagagctcattggacattagccagcaaacgtggtcgacgccaaactagccaggaagtctctgcatttcagttytaatatgtctaacactggagcttctttctccaaagccaagggtgaaaagactgcagctggccaccatgggtcttctgttgtctaagaatctgtagatgca

SEQ ID NO: 50195 - DNA, 201 bp, Homo sapiens
tcccacgtataatagctataagaagaataaaatacctaagaatacatttaacgaaagaggtaaaagatctctacaaggagaactacaaaacactgctgaaraaagtcatagatgacacaaacaagtgggaaagcagtctatgctcatggattggaagaatcagtatcattaaaatggtcatactgcccaaagcaatctaca

SEQ ID NO: 50196 - DNA, 201 bp, Homo sapiens
aaccatcatctcataccctctgcatttactcattgttttcctttattaaactccacgccaagggtgctttaggaaaacaaacttcatacatatgcagaackgcttttagggaatgtgtatattagaatagcttgccttgtgctcgatttgcttttgttggattattcctgtttaagcagagcaagcgtatttattctactg

SEQ ID NO: 50197 - DNA, 201 bp, Homo sapiens
tactaaaaatacaaaattagctgggtgtggtggcacatgcctgtaatcccagctactcaggagcctgaagaaggagaatcgcttgaacctgggaggccaargttgcagtgagccaagatcatgccattgccctccggcctgggcaacaagagcgaaactctgtctcaaaaaaaaaaaaaaaagaatacttttctctatcta

SEQ ID NO: 50198 - DNA, 201 bp, Homo sapiens
cttgaacctgggagtcggaggttgcagtaagccaagatggtgccactgcactacagcctgggtgacagagcaagacttcatctaaaaaaaaaaaaaaaaaattaatgtagtaaaagtaccttgttaagtatacaatcatatgcaaatgcacagggatgttttctgcttcatcttagcatggtcataactggcacatcatag

SEQ ID NO: 50199 - DNA, 201 bp, Homo sapiens
gagctggccttgctcactgcatccgcaaggagacaattagcacagcctgctgcctgtagctgagctgtgcagagccagggaacaggagtgctccaaaagcragaagggtttccggttgccctttcaacctcagaagtcaggacttgactcacagtcttctggatttttgacaaacaaaatcctatgcctatgcctagatcc

SEQ ID NO: 50200 - DNA, 201 bp, Homo sapiens
tggataagagacttttatcggggcatgcactgtttgccatagatcccaccattcccagttgtctgatggctgcttcacacaaacatcacctacctgactcyttagggatttgaagtttgcacctcctacatttgcttagtaaatacttgagagaagcagtgaggagtgggcaagaaggaaatcctttttttcttttgctta

SEQ ID NO: 50201 - DNA, 201 bp, Homo sapiens
aggctcctttctttcttttcccactcccttagccccagcttggctcccctgtgaccacgtacgctggttctaactacaagggctgcgaggctccagtcccmtgcctgtgccttagggaacccagtgtcctctggctccctggggcgtcagcatgaattcttgaggaagcactggggaattactcatggattacaaaaacag

SEQ ID NO: 50202 - DNA, 201 bp, Homo sapiens
agagagggcctcaaattgtatctgtaaagatttatgttgtttcttggcgcggagggggttgttttttgttttttgagacagagtctcactctgtcgcccakgctggagtgcagtggctccgtctcggctcactgtgacctccgcctctctggttcatgcgattctcctgcctcagcctcctgagtagctgagattacaggc

SEQ ID NO: 50203 - DNA, 201 bp, Homo sapiens
gcgtgagccaccgtgcccagctaaccttatgtttttaaaattgttgttgttggttttgttttcaagtgaactttttgcctgttctgtcaggatcatttcargagagtagcaaccctaaagaaaactctctttttctttgacataaaacttatttttaaaaaattaaataaatacttagtgagttcctactttgcatctggc

SEQ ID NO: 50204 - DNA, 201 bp, Homo sapiens
ctaattttttcttttgtacagatgggggtgagtgggcctctcgctactttgcccaggctggtctcaaactcttggcctcaagtgctcctcctgcctcaagsctccacttcccagagcactgggattacaggcatgagccatcaggctggcctacttgcctcaggcagctgacagccattccactcactgagcatgagctgc

SEQ ID NO: 50205 - DNA, 201 bp, Homo sapiens
ggtactttcttacccacctgtcatagacgggaaactgaagatcagagaggctagtgatttgccttagctcacacagacagtgagtagcaaaatgtgaagtycaccatctgtcatgctgccttcatttaacctggccccctccagtctcccacatcttaccaaatggcatcgccatggtcacaatgactaaggtgctaaacg

SEQ ID NO: 50206 - DNA, 201 bp, Homo sapiens
atcctgaggcaaattgctctccagctgtgaacttgtaaaatcaaacaagttacgtgtttccaaaatacaatggtgagacaggcataaaacatacattcccrttcccaaagggagaaataggaaagaagaaaggagtaacaggtctcaagtaagtccaaaatccaaaaaggcaaacaaattctgaggcttgagagtaacctt

SEQ ID NO: 50207 - DNA, 201 bp, Homo sapiens
tgaacttagagggaagagagtccagcccacaacaggcatgacccgtggctctgcccttggctaaccataggaccgttaaccagccacttggtgtcttcatsccttcactcctaacctctcatgtggttgtcggggaaaataactgagataatgtacatgagtactcagggcactgcccagcgcaacagtcagccctcagta

SEQ ID NO: 50208 - DNA, 201 bp, Homo sapiens
cggtataccttgtatccagagctttagatgatagatagcaatttgttaatacttgtcactaagactcaatgactggaactgtggtcagaggcatgcagccmtatcctccctcctcaattgatcatctttattcttgcaagatggtccaacctctctaaatgagggcaatcaatactgtgcattcagccataatcgtggctt

SEQ ID NO: 50209 - DNA, 201 bp, Homo sapiens
tcatggcgggagatgaaaccgtgtcttacatggcagcaggcaagagagagagtgagagccaggtgaaaggagtttccccttataaaaccatcagatctcgygagacttattcactaccacgaaaacagtatgggggaacccacccccatgatttaattatcccccaccgggtccccccaacaagatgagatctgggggagg

SEQ ID NO: 50210 - DNA, 201 bp, Homo sapiens
gcatacaatgtgcctgggttcaggtcagatcaggcaggtactggaacttgggttcaggtcaggcaggccctggaacttgggccagttgctcttacctgtcmctgaactcaagcacttccacacctgcattccctccagactcaggttctttcttctgagaagaaaccttacattttttttgggggggggggttgtgttttt

SEQ ID NO: 50211 - DNA, 201 bp, Homo sapiens
acacttcgtcatttgctaattgataatacagctcgcccctgtggcactaagtagcatagtggaaaatatttccaaccaatccatggaaacagctccatccrtgtctgaagagggtcgactgaaagctgagatgaactgagggccagtgacggggtaatgaggtgcatttcggaggctggggtctgcatcctaggtgtccat

SEQ ID NO: 50212 - DNA, 201 bp, Homo sapiens
cagggctggatgtccaagatgtcccatcacatggctacaggctgggagcccagctgaggatcaaccataggaccaaagctcagcctctccaggaccatagyctcagggggctcagacttctttacaggctgactggcttgccctaggccaaaacgcaagatgtccttttctgacgtattcttgtaagtcagacagcatcac

SEQ ID NO: 50213 - DNA, 201 bp, Homo sapiens
tagataatttgtgagggaaaatagtctggatgctattggctcattcattcgttctactaaaggtggaatgatatgttaatgtcttatcagccaagtcaacytagaaataagaatgtcaaccatgttaaattgtaagattattcaatcttatagattataattccctatagcatgcagagttatttcacaggctttatcttc

SEQ ID NO: 50214 - DNA, 201 bp, Homo sapiens
tttaaagatagtgatctagttataagatattaggggattgaaactatgtttgcatatttacagaaaacagaaaacacaaagtgtttataccaaaaaaaaawaaatggagaggaaacactataggtaggttgggagggacacccaaaagtactgtttcatggaagatgtggcctttgagctggtcctgaaatattagatggc

SEQ ID NO: 50215 - DNA, 201 bp, Homo sapiens
ggttgtttctagtttttgactatcatgaataatgttgctatgaacatttgtatacaagaatttgtgtaaatgtatgttttcatttctcttatatgcacccrtacatggaattgctgggtcatatgacaagtctatatgtttaacattttaagtaactgccaaagagctttccaaataggctgtaccattttactatcccac

SEQ ID NO: 50216 - DNA, 201 bp, Homo sapiens
ttactttggtcctttggttgtggtccttctgtagcagccctggcaaactaatgcaccttccagtcttagaatggatcatcaaaaaggaggtttggcagtgygggaatgacctgctcactgttcaaggtcaccttgatgtcacctggccctctgctttacagccaagatggtcaatagttgatccaattacgacttttttct

SEQ ID NO: 50217 - DNA, 201 bp, Homo sapiens
atattatccaggagaacttccccaacctagcaaggcaggccaacattcagattcaggaaatacagagaacaccacaaagatactcctcaagaagaggaacyccaagacacatacttgtcagattcaccaaagttgaaatgaaggaaaaaatgttaagggtagccagagagaaaggtcgggttacccacaaagggaagccca

SEQ ID NO: 50218 - DNA, 201 bp, Homo sapiens
agcctatgctagtctgaaggaagaagctggttgtgagctttctgtgtaaagcaaggaaactctagaggccatctcacttgtgatgtgagaactagaacatytggccatctgtccaaggaaggattaaggaagcttaccctacaccttgggttccaggtgaaatccattaaccacaagggctacatcaacttgaaaggaaga

SEQ ID NO: 50219 - DNA, 201 bp, Homo sapiens
aatttcctatacttctaagctgccatatcattggtgaatttgactccagagataaagagataaaatgctgacagatggaagttgtgtcaatgtgcactgayatgctcaaagcaaggagttattatggatggggcatctaatagcatctaggacacttacaaaatcagaggtctccaatcacacatccctatttgtaaaaca

SEQ ID NO: 50220 - DNA, 201 bp, Homo sapiens
catttctgcattgtgaattctgctctttgctgctttcaaaccagatttaatttgggttttgtgctgggcatcctcttcttgtctctatgattcttcaattyaccttttgttcctttttaccttttgtatcttttgtttaaaaaggtaaaattcttcaattttactgcttatcttgtgtttttttcctctccgtcttacgga

SEQ ID NO: 50221 - DNA, 201 bp, Homo sapiens
ggggttgtctgaagactcaacagggctggatgtccaagatgtcccatcacatggctacaggctgggagcccagctgaggatcaaccataggaccaaagctyagcctctccaggaccatagtctcagggggctcagacttctttacaggctgactggcttgccctaggccaaaacgcaagatgtccttttctgacgtattct

SEQ ID NO: 50222 - DNA, 201 bp, Homo sapiens
atggaatgtggtttatgacagcaagaattattgcttgtctagactcaacaagttcttaaccttattacagtcttacaaatgacggatttgttatctagggwagaaaaagccctcttctgggactctgagacaaaggatttatttgtacccacctgagacgtgctcagagagggactggaggtgcatggagagggctcctgt

SEQ ID NO: 50223 - DNA, 201 bp, Homo sapiens
ccatctactcaatggtaggtcatatctcaattaactattgctacgtaacaaatgtaacaagtgtctccaaagctcagaggataaaaacaacaatcattggktattgtccattcatctagacgtgggctggggtaaactgttctagatgaggctcagcagaaagcgacaatgctccacgtgcctctcatctttcttaactac

SEQ ID NO: 50224 - DNA, 201 bp, Homo sapiens
aataataattaggttaacattgttgctccctgtgacaaaattttataagcaaatttcaaaagacatgttgtaaattaggaggctcaacaataaaacattaygctccagaaattatgtgagatgtgctatattgtacatgaaaatactttcatccattctaggaacagataatttaaaaattgccaaagagagatctaaaga

SEQ ID NO: 50225 - DNA, 201 bp, Homo sapiens
tgaaggttgcagtgagctgagatcacaccactgcactccagcccgggcaacagagtgggaccctgtctcaaaagacaaaaaaaaaaaaaaaaaaaaagagrgagataagtaacttactcaggctcacacagccagtgtgggaactaaacccaggtctgattgatcaaccccaaagcccttgccctttccgccacctgaagc

SEQ ID NO: 50226 - DNA, 201 bp, Homo sapiens
agtagctgggactacaggcatgcaccaccacgctcagctaattttgtatttttaatagagacgaggtttctccatgttggtcaggctggtctcagactccygacctcaggggatccacctgcctcagcctcccaaagtgctgggattacaggcgtgagccactgcacctggcacatttatatattaacatagggaaaattg

SEQ ID NO: 50227 - DNA, 201 bp, Homo sapiens
tttttcctaatgtgagttgagactttaccaaaattaccctcaaaaggagcaagttgccttcaggcgaagtcctcacaaagcctcttataatagtgtgtaayagtaagtgctctcaaaattatattactcataaaataaatttgtatttaggagaggcataatttcccttaaccttaatcaatgctaattgagctcttaggg

SEQ ID NO: 50228 - DNA, 201 bp, Homo sapiens
attattcacccaagttactcaacaggaaagcaaagattttttccttgctttccattaggaagcaatattagttagatctggatttcattctgtccctgtcrtctctcaaaactgtgaccttggccaagttatcctccctcaacttcagtttccttatctgttaaaagacaatagcaattctgaccacataggattgcagtg

SEQ ID NO: 50229 - DNA, 201 bp, Homo sapiens
tatgacttgaacatttgctggttaatagatgtagggatggaaacagtgttgtgccaattactgtaattaaccagaaatgaagacaaatggaagggagcctyttctgcccaccaagcttcaacttaaatgctgagtcatgagctactagtggaggctggaaggccaagacctgggctagtgctgggaaaaggaagtagctct

SEQ ID NO: 50230 - DNA, 201 bp, Homo sapiens
gaagataaattttgtggttgtgtcaaagaatcatgagtactataactgtcattttggctagagccccattcttacctttaaaagctcttaatcatttttcyttgaagacaaagacttgatggtaggcagaattgtaaaatgcccccctaagatttccaccctctgctgtaagcactctgtatagtccctctcttgagtatg

SEQ ID NO: 50231 - DNA, 201 bp, Homo sapiens
ccgctagtgccttcacctttccctgcctcctccataactgcagggccctggagatgtgtcaggcaggggattgagaagtgctgcattgcattttctccaargctctgatgtatctggggctgttcctcacagagagcaagtgtggcagggatcatggcctccagggtcggtggtcctccctccgagggctgtccccactcc

SEQ ID NO: 50232 - DNA, 201 bp, Homo sapiens
cacagggcagtgactacctatgggacaatacagctctagaccttcctttctatgtgagagagagactgtgagatagtatatcaactaagaattcttggccrggcacagtggctcacacctgtaatcccagcactttgggaggccgaggcgggagtattaagaggtcaggagttcgagaccagcctgaccaacatggcgcaa

SEQ ID NO: 50233 - DNA, 201 bp, Homo sapiens
tgagtgctacagtcttttcttagcctgacatttttctgcaaatgtgttacttccaaaatgagggcagaatttgcatgaataacgttttggtactaaacacwgtatttattaggatgaaccatttttatagggctttctaaaacacaattatatggacataaagatggacaatacaatcttatctccctttagccaaagagt

SEQ ID NO: 50234 - DNA, 201 bp, Homo sapiens
gaaggcaggcagtgcatcaatatcatgtgctacacagaggacctaaagttacataaaattgaggttcgtcagaggctagaaagaaacagtttgtgagtgargctgtatgtcagatcccctctacgtgtctcattacctagatgtcactctagacttgatataaatcagtggttcagtctttagggggtacatcatagtttg

SEQ ID NO: 50235 - DNA, 201 bp, Homo sapiens
aaaaagaatgataaagcaaatgtggtaaaatgttatatttagaaaatctgaatgaagagtatgtaggaattctaaatactcttttcccaatttttgtattrtttccaaattaaaagtttacaaagaaaaagcaagtagatccaccatgacttgtgctccaaatgtatgcaactgattttgcagaatctcatgcttcatgct

SEQ ID NO: 50236 - DNA, 201 bp, Homo sapiens
caccattgctgacctgctagaaggttgatggttttcaccgtagcattcgtaatcttggttgtatgcaccctgcctttattttactatatatgcaatatagwctttgaagtccctgtcctaccaagagaatcctaccttattttgggctttggctgctctaaaaatgaaaagttttgaaaagcacaagtcaccctaaattgg

SEQ ID NO: 50237 - DNA, 201 bp, Homo sapiens
gtgcatgccaccacgcctggctaatttttgtattattagtagagatggggtttcactatgttggccaggctggtgtcaaactcctaaccttaggtgatccrcccacctcagccttccaaaatgctgggattacaggcgtgagtcaccgcacccagccaaggccccacttcttaataccaccataatgggaagtaagttaca

SEQ ID NO: 50238 - DNA, 201 bp, Homo sapiens
gtttcaggaaataaatctctctgtagtctctggaatagccacagatatgcttctttgaacaactcatttatcttgtggacactgtaactataactgactakatatccccttttacgtgggctactaggaagctcagataaaatctagggcaaaagagaggcatatggatgctaagtttatccttagtttcatcttaatctt

SEQ ID NO: 50239 - DNA, 201 bp, Homo sapiens
agtaaacaacatcttcaatcaaaaagattgagtcaaaaattaaaattaagtgtgttattcaaaatccacaaaaccaagcaaatgtaccacaaacaatgacyttccaaatgatggtttttgcaaatttgtcaaatgtatatttctgaaaatattaaagctcgagaccacatcaaggagtcgtaacactgtctcctgccttca

SEQ ID NO: 50240 - DNA, 201 bp, Homo sapiens
catttcagacccccaaaacaaaggagaggagaatgagatgaggaaaaaggaacttgagagagagcagcttctccaagcaagcagagaagggaatggggaargaatgggttattcactaaacaatggtggatcatctcccattacagaccagaataaaaggcaaaccaactaaagacctaaatgttaaagaaaaaaaaaacc

SEQ ID NO: 50241 - DNA, 201 bp, Homo sapiens
cccgtctgtactaaaaatacaaaaaaattagccaggggtggtggtgggcgcctgtagtcccagctactcgggaggctgaggcaggagaatggcgttaaccygggaggtggagtttgcagtgagccgagatcgcgccactgcactccagactgggagagagcgagactctgtctcaaaaaaaaaaaaaaaaaaaagttgcat

SEQ ID NO: 50242 - DNA, 201 bp, Homo sapiens
caaagtgctgggattacaggcgtgagccactgcgcccggcccagcttttcttaatggtagtaatggcagtcatattagcaacagcttctatttatcaaagyacttagcactttgaaagaaagacattatgagttcctgcctcagtctgggttgtcccagaagtccaacctgagacaagacttgggtgctgacagttttttg

SEQ ID NO: 50243 - DNA, 201 bp, Homo sapiens
acagggagaacagcatgtgaagatgaaggcagaggggctggggatgcatctacaagcccaggagagccagagatggccaacagcccaccgggagctgggaraggaatgggatagattccttctccagaacttctaggaatggaattgaatctattatgtctccagaacttctagagatggattctattcctagaagttctg

SEQ ID NO: 50244 - DNA, 201 bp, Homo sapiens
caattaggactaattagtgcttagggcaataaaactcatcattgtcagcggtaagaattcccaagtgtccaattacccaagacacagtcatagtgactcargcaagcatgatccccatgccttagggagccaatgattaagacagagtgtccactttgaccagtaaatgggttcttttcaattatcaagtcattttcaaag

SEQ ID NO: 50245 - DNA, 201 bp, Homo sapiens
caagctatgtttaaaaagggatcagtgactccaaaccaacctgaactgcagggcatattgacagaaagggagtgactaattcgtaaatgtgaatgaagctktattttatttaagattaaaaagtgatgaacaagagagagaactaaattacagacttgtggacggctacattacaggaattcatcacaatttcccttctgg

SEQ ID NO: 50246 - DNA, 201 bp, Homo sapiens
cctccctttccatggagtctgaggacctctcctctcacatgaggcctccagcaaggtagatggatttcttataggtggctcaggactcccaagagtaggcyttccaaaagagaagaagcagaagctgccagtcctcttaaaggctagacctggaatgggcaccggtaactctgccacttatgttggatgaatggtcccagg

SEQ ID NO: 50247 - DNA, 201 bp, Homo sapiens
atgatccatttggattggccaagctatgtttaaaaagggatcagtgactccaaaccaacctgaactgcagggcatattgacagaaagggagtgactaattygtaaatgtgaatgaagctttattttatttaagattaaaaagtgatgaacaagagagagaactaaattacagacttgtggacggctacattacaggaattc

SEQ ID NO: 50248 - DNA, 201 bp, Homo sapiens
cttgaggtgttttggaacaagggaagtcactaccccactgcctttctacattacaaaaacattagcaaaattatagaagtaactgctggcatttcttgagytcacacagtgggccaggtgcttatatgcaccatcacttttgatcctcaccacaaccaaagtacacatgggagtggaggagcagcacagtacgctagagaa

SEQ ID NO: 50249 - DNA, 201 bp, Homo sapiens
acaactagcaagtggtagattcagtatgtgggcctagacagtccttctccagagactgactctcactatccctttattcagcactctctgtattgcatgaraaaaaatacatgttgcatctgtagctgaacttcatacaacgcacaccaactacatttgggagacagattcatttatttacaaattcccagtggccaccaa

SEQ ID NO: 50250 - DNA, 201 bp, Homo sapiens
tcaccatgttgtccaggctggtctcaactcctggactcaagcgctccacctgcctcagccttccaaagtgctgggattacaggcatgagccaccaggcctygcctataaagctctttaataaacttttttttttttttgagacagggtcgtgctctgttgctcagactggagtacagtggcacgatcatggctcactgcaa

SEQ ID NO: 50251 - DNA, 201 bp, Homo sapiens
accaccaagcctgtctactttttgtatttttagtagagatggggtttcatcatgttagtcagactggtcttgaactcctgaccttttgatccacccatgtsggcctcccaaagtgctgagattaccagcgtgagccaccgtgcccagctaaccttatgtttttaaaattgttgttgttggttttgttttcaagtgaacttt

SEQ ID NO: 50252 - DNA, 201 bp, Homo sapiens
ccactgaggtcaaccaatcctcctacctcagcctccctggtagctgggactacaggcatgtatcaacatgcctggctaatttgtgtattttttgcagagayggggtttcaccatgttgtccaggctggtctcaactcctggactcaagcgctccacctgcctcagccttccaaagtgctgggattacaggcatgagccacc

SEQ ID NO: 50253 - DNA, 201 bp, Homo sapiens
ctcaagtaaaatgtcatatattatgtgtttaaaaggattctagtatccaattgaataaaaaagaatatatacatatgcacacacacgtaagatttttatawatcatggagtaaatgtatgctttatatttataatgtctacatatcatatttaaatttatatattgatatatagctatttaaaataaaaggtatatatctt

SEQ ID NO: 50254 - DNA, 201 bp, Homo sapiens
agtgtatcactcacccaccagtccatctctgtgttcctggtggagcagctctcctctaagcagtgattaggggatgcagactcctttcatctttggcatargtttccaatgttcctgggcttttttgcatcaaactacttgaggggaaagagagtgaataattgcccaagggtaatttttatgggccaggttaacaaatag

SEQ ID NO: 50255 - DNA, 201 bp, Homo sapiens
atgaggcccccctccggcacagaatgggaactaggcaatccagacacatccccacccagcatcctccttctggttcactagcagaactggatcatgaatcracaaaatgaaggaggctttgcaagaacaaagcttttggaacctgtattcctgggtggtgctggagccattcattcctagccaggtgccatgagcactttc

SEQ ID NO: 50256 - DNA, 201 bp, Homo sapiens
gtattcctgggtggtgctggagccattcattcctagccaggtgccatgagcactttctctgtgggccctgttggctcccctttacctctcacccccaaacrcctttccagggaggtgtagtgctgagtgcactggtcagatgtggggacactgactgttcacagctggagtgaagagggacagagacttctcctcgtcccc

SEQ ID NO: 50257 - DNA, 201 bp, Homo sapiens
aaagttttaaacaccgctgaggccagggcccattcctagcaactctcagttccctgctctggtggttggcctgagcacagggcttttgccaccttcccagstgattgcactgtgcagtcaaggctggggacctctgcttcgcgaggacaccttgttttcttgtagtgatgttaactccagtctctgcctcctccatctcca

SEQ ID NO: 50258 - DNA, 201 bp, Homo sapiens
attatcagcccagcagggaagtgatcatggcccaggtcctcagagagttatatgcacagttaagttgtcccagatactggaagattgactgtgttatgtgmccatagggagaggcaatgcggcttagtcgaaagttcatagcattgagaatccatcaacctgatgactctgccatgttttaactgttggacaatggcttcc

SEQ ID NO: 50259 - DNA, 201 bp, Homo sapiens
tttaaaatgggcaaaggacatcaacagatacttctcaaaaaacacacaggtggccaacaaacatatgaaaaatactcaatatcactaatcattgcagaaawgcaaatcaaaaaccacagtgagataccatctcacaacagtcagaattgctgattaaaagtcaaaaaataggctggatgcggtggctcatgcctgtaatcc

SEQ ID NO: 50260 - DNA, 201 bp, Homo sapiens
caccaaaacatctgatagttaaaaagcccatcttaaatgtttgtggaaatgaatggaattggatggttttagtagcttcaatttgactcatctaagaaaayagtataacccacatgtagctgtcctcctgagggtggcctctgttttcactatctgccagccatgaaacagggctgcttcatccctgcacagatatcttca

SEQ ID NO: 50261 - DNA, 201 bp, Homo sapiens
ttttagattgaattcttcctggaaaaaaaaagtttcccacaatgccctgccagaaggatatggtgtccaacccagtttaaaaagtgcacccagtctttagsttcaactgctgaagaagcccaacccctgggctggagacctcccctgccccctcgcagcccaggctgtgggtagcggcagcgtctcccctgctctccccag

SEQ ID NO: 50262 - DNA, 201 bp, Homo sapiens
tcaatagattattcagtggaactagacaaaattgttttaaaattgatatggaaaaacaagtggccaaaatagaagaagacaagtaaggaggaggaaaaaargagaaaaaagaggaagagaatgaagataaagaagaagaagatgaggttgaagttcagcaacaacagaacaacagcaagatgggaagctttgccgaccgga

SEQ ID NO: 50263 - DNA, 201 bp, Homo sapiens
ctgattattacaactactggtgattttgtcacctaaacaataaaacaaaaattaatggaattagtggagttgctcttaaaaacattatgccaccacattargcttacaaactcaagtgtgtcacaaaacttgtgtgttatcttatgataaagcacagttcctaaatatgtctcaggacccataacatcaagaaatgccaaa

SEQ ID NO: 50264 - DNA, 201 bp, Homo sapiens
actatgttagccaggaaggtcttgatctcctgaccttgatatctgcccacctcagcctcccaaagtgctgggattacaggcgtgagccaccgcacccagcyttcattcctaattttttaaaacgtatttattataaaagaatgttgtattttgtcacatgtttttctgcattgggatgttcatgtggtttttgttatttat

SEQ ID NO: 50265 - DNA, 201 bp, Homo sapiens
atgacacagcctcaggaggtcctgagaacaggtgcccaaggtggttgagtcagagcttgattttatatgttttagggagacataagacattaatcaatacrtgtgaagtagacattggcttggtctggaaaggcaggacatcttgaagcaggggcttccaggttataggtagattcaaagattttctgattggcaattggt

SEQ ID NO: 50266 - DNA, 201 bp, Homo sapiens
aggcatcacgctacctgacttcaaaccataatacaaggctacagtaaccaaaacagcatggcactggtaccaaaacagatatatagaacagaacagaggcytcagaaataacaccacacatctacaactgcctgatctttgacaaacctgacaaacacaataaatggggaaaggattccctatttaataaatggtgctggc

SEQ ID NO: 50267 - DNA, 201 bp, Homo sapiens
agggaatgcaggatggagctgccccaagcctgtagctcagatgcctcacaggggcatttctgatctgcaacactatgtccctgttgtgagctgagtcccakgcctctctgaggttggacatcccagcgtgcctcttcccactccaacagcacacctcagaaggaagaggcagcctcaggggcccgctgagtggccactcgt

SEQ ID NO: 50268 - DNA, 201 bp, Homo sapiens
aaaccagtgtcccataattcacctgctggaacccctgtgcacaaagggattgtgtgattaatgtagattttggtgtttcatattgtagcaacttaataagrtatgtgcccagcttctaaatgaaggctataatcacttttccatagtttatgaattatgaagttggattcccatcccaaatgctgtccaagttttttggct

SEQ ID NO: 50269 - DNA, 201 bp, Homo sapiens
tattacaagggcatctctcacagaatcagattagcaagatgggaaccaggctgatttagagacgagtaaccaaggccctaccataagaaccatcgacttargacactcctgcagaccctagcccaccttggtcctgatcaccctcttcctgctgccagattccacaacccagatactccccctactgctgaatgttcagct

SEQ ID NO: 50270 - DNA, 201 bp, Homo sapiens
tctctctccctttgctctgaagttgaaactcaggcctgtctattaggtacctttagaattatcactgagatcattttaccttgcacacaatccagggaaaycagtaatcatctctgggcagatatcagtaatgtgcaaaacccatttcctacttgacttggaaggagaaagaaatgttaggaagagtgaaaaatgaatggg

SEQ ID NO: 50271 - DNA, 201 bp, Homo sapiens
gaggacctaaagttacataaaattgaggttcgtcagaggctagaaagaaacagtttgtgagtgaggctgtatgtcagatcccctctacgtgtctcattacmtagatgtcactctagacttgatataaatcagtggttcagtctttagggggtacatcatagtttgaatcccattgtggactgttagcccagccctaaaata

SEQ ID NO: 50272 - DNA, 201 bp, Homo sapiens
cctgcaatagggtccctggcaacaggcttctaggtctatcctcaaaatgtgctgctgccattctctctactgtccaccttgactattgttattggaaaaargagtttgagaaatagttgtctaaaagagcaatttgtgtgcacacatgggtgtgtattagcatttcaaataacaatgtatcaatagatatccaagggataa

SEQ ID NO: 50273 - DNA, 201 bp, Homo sapiens
taaatgtttaaaagatattctcatagaaataatagtgatacccagtaacaaagacttctactttcttatgttttttatttgtacaaacgtgtaagccaacrgtcctatttgaggaagcgttctaaaactaaatacagaagtgaactatacgttattttctgagaaggggaataattaagttgtatgcatgttattcgtatc

SEQ ID NO: 50274 - DNA, 201 bp, Homo sapiens
cacaactttatagtatgattactactctttaaaaattaggtatgaatatgaattaagattgaatgagaacccagaacaataaacatgattaatggggttayatggtatcattgtggggaaaaaaaaaagttttccagttatttgtgtgtaacaagtgaaagcatatattgttaaaggtgttcgtctctttcaaagtgtaac

SEQ ID NO: 50275 - DNA, 201 bp, Homo sapiens
caggatgaggagccttaggatttatttttctgcattagaacatgcactaaaggtgagccagttttctttaattcagttcaacaaatacttttgaacaagayttagtgtggtggcactgaaattacaaagattaactaggacatgtcatctcctgcaaaagatattgttatttagtaagaagttatattcaaataagaataa

SEQ ID NO: 50276 - DNA, 201 bp, Homo sapiens
ctatagtttggtcttgatgtcttactcaccagagtggctataaactctatcctgccccaacaggactccaggggattggctgtagatgtttacaatgtgcyttagtccgttcctgatgctgtaacaaaataccttagactaggtcatttataaataacagagatgtatttctcacacttctggaggctgggaaatcacaaa

SEQ ID NO: 50277 - DNA, 201 bp, Homo sapiens
ctgttaaagcagataatattgggaaaggcaatgtctgaatgtatttctgccaagatgtcgatggtttatcaaaatcaatttcttcctgtggaagagtttargtgcaaggggaggagagaaagtgagagaagattataacagggaggctatggatgcagaaaggaaaagcggggaatcaaaggcaaacctgccacccatttc

SEQ ID NO: 50278 - DNA, 201 bp, Homo sapiens
caaagcaccgggattacaggcgtgagccaccatgcctgaccaaaattgacggtctttgaattaggatccagaacaagggttaacaacatttaaaaatattygtctttaaatattctgatgcctttccctctgaagacttcgggaggcaagtgggagaagaaggcataatgatttagggaggggactatagtctcccaaact

SEQ ID NO: 50279 - DNA, 201 bp, Homo sapiens
ccaataacgttcaagctgagagccaaatcaagaacacaatcccacgtataatagctataagaagaataaaatacctaagaatacatttaacgaaagaggtraaagatctctacaaggagaactacaaaacactgctgaaaaaagtcatagatgacacaaacaagtgggaaagcagtctatgctcatggattggaagaatca

SEQ ID NO: 50280 - DNA, 201 bp, Homo sapiens
taaatattctgatgcctttccctctgaagacttcgggaggcaagtgggagaagaaggcataatgatttagggaggggactatagtctcccaaactatagaragcagccatagtgacagcaattgcttcactcatcaaaatcaacagtgaaacctaacacacgtaccgtagattagtgactctcagtccagttactcattgt

SEQ ID NO: 50281 - DNA, 201 bp, Homo sapiens
caccaagtaaatcatgcttttatacacgcacgcgatgcccatgttgagaagaaatttgctaagcggctgtgtttgttgaatcctgagcctgcctctgcacytagaacaatcccaccatgaaatgaaatgaatgcttgcaaagatttcttacttcctcctttaaagagtggtaggaaaatgaacaaagaggataaaaggaag

SEQ ID NO: 50282 - DNA, 201 bp, Homo sapiens
aaagcagccatagtgacagcaattgcttcactcatcaaaatcaacagtgaaacctaacacacgtaccgtagattagtgactctcagtccagttactcattrtataaccggaaaaaaaaagaaaaatttcttttcagaaatatgcatcctaatacaagctcttttggggaaggcaaatctctaatggtggcctagccttagt

SEQ ID NO: 50283 - DNA, 201 bp, Homo sapiens
tggttggggatgtggtgggaggggttggccagagagttgaataaagaggaggaaaaaaaaaaaggaattagatttttcagaactgcacaaccaaagatttrcacacttatttatagaggtgacccgtgagcttggttgaccctggatgcttttctgcgctataagggaacccgtgggtggccgatcactctctggccctcc

SEQ ID NO: 50284 - DNA, 201 bp, Homo sapiens
aaattgacaagaatggggagaaaactgtaggatcctggggttgctctttgtttacaactttaaatttgacattaacttccataaatatccaattgttctcytagtttttcctaaatagattcatttcatgctcattttgtatcaaaggcaaaagagtccaaagaaaagtgaacaatatacagaatcactattggaagcatc

SEQ ID NO: 50285 - DNA, 201 bp, Homo sapiens
atccagattatatgcttttacttctactttgtcaggcagccaattgtaagtcaaaggaagaattatcttgcagtatttccacatcccctatcccaaagttstttagatcaaaattgacaatatttggaggaaaaaaataaaaacagcatatagatttgatcataagcattccctgaaagatttcaatctaagaagacttta

SEQ ID NO: 50286 - DNA, 201 bp, Homo sapiens
gcacagcactgagtgcataggataaaatagctattactgcagtagtaacaataagctggttgtgcactagtgacactcttttcctcaaaaaagtagctgtrggttatacttgtgagggagtgacaactgattgagtaaggaataggaacccagcccagcagcaatccacccatgggctagtcatgacccatgagatgacct

SEQ ID NO: 50287 - DNA, 201 bp, Homo sapiens
aaaacatttgcaaagtgttgtaagtcattagagaaaaaagttttgacctggaatatttgggtttcactcttctaaagttttaagtagagggcaaagagatkgtcagccttgctttctgtgtaaacacagtgtctggcaaaactaagtctacaggaaatatttgttgaatgaattacttgattgatgttggtattagatgta

SEQ ID NO: 50288 - DNA, 201 bp, Homo sapiens
tttaaacaatgacacacacaaacaaaaaagtgaatccttccatttgtgagatggtaaacatctcaatgtcaagacagtatttttacacattgcaatattcmtgaataccgtgagtggacataatcaaattaaatcacgagataagttaggaaccctgataatatgaaaaatgtaataactttgatatttttgtcagaatca

SEQ ID NO: 50289 - DNA, 201 bp, Homo sapiens
tttatagtattgcttatattagttctttcttaaaattctaatgttaccacaagtccttttatcagaacttcaattacaaattcatttttattcatcttttsagtagctaggttttactgaaacatgaagaaattagcctaagcatgaaaaaggagctgtctcagtttcagattaaaggggaaaaaattggcaggggaagtc

SEQ ID NO: 50290 - DNA, 201 bp, Homo sapiens
ctcactgtcacaaagctgtcttgggcagctgtctctccgctctggcagtgcagcccaccttcacacctccacacagaagggaggtgcaagactgggagctstgtgatggggcactcacccccatggcaagccttctggcaccagccccataaagagggcactttcttgggcagctttcctgaggacacagtggcaggtatt

SEQ ID NO: 50291 - DNA, 201 bp, Homo sapiens
agagagggagtggacaaaggacagatcatgatttctgggcagtactgcagaggcaagtgggaaagaatggatttatggtggcaccagcagacatcttaagmatgtcttaagcaacattcagattagggttgagaggtgagagaaatggaatcttccaaataatagagtgtcaatgaaatagaagaataggtaaattggaaa

SEQ ID NO: 50292 - DNA, 201 bp, Homo sapiens
agagaacaagggcttgcataaaagaaaggatggttacccagcaaaaagtgtttggaggtcaccagtctgggtcatttgtcctggaaggcgagtgtctctaygttgcacaaagaaagtgggaatattccatgtgtttcatgcactgggcaagaagaaacaaggcattcaagggatcttataaatctagaagagcataaattg

SEQ ID NO: 50293 - DNA, 201 bp, Homo sapiens
acctaaagttacataaaattgaggttcgtcagaggctagaaagaaacagtttgtgagtgaggctgtatgtcagatcccctctacgtgtctcattacctagrtgtcactctagacttgatataaatcagtggttcagtctttagggggtacatcatagtttgaatcccattgtggactgttagcccagccctaaaatagttg

SEQ ID NO: 50294 - DNA, 201 bp, Homo sapiens
cataaaagaaaggatggttacccagcaaaaagtgtttggaggtcaccagtctgggtcatttgtcctggaaggcgagtgtctctatgttgcacaaagaaagkgggaatattccatgtgtttcatgcactgggcaagaagaaacaaggcattcaagggatcttataaatctagaagagcataaattgagaggagcatcttttt

SEQ ID NO: 50295 - DNA, 201 bp, Homo sapiens
aatgcattgtctaaaccacagccagtaagcaacaaggctcaaatgctttttgcaatagttgttaggcacataaacatagtgtttgatctgctttccctcaygtataaaatgaagggttaaacgaatgtctttctaggatccgttcgcgctgattacagacaaatgggagtgctccatgtaaacaagtccagaaagtttttg

SEQ ID NO: 50296 - DNA, 201 bp, Homo sapiens
tttggaggtcaccagtctgggtcatttgtcctggaaggcgagtgtctctatgttgcacaaagaaagtgggaatattccatgtgtttcatgcactgggcaasaagaaacaaggcattcaagggatcttataaatctagaagagcataaattgagaggagcatcttttttaatattaggaaaaactattaaatgaatcattgg

SEQ ID NO: 50297 - DNA, 201 bp, Homo sapiens
ataaatctagaagagcataaattgagaggagcatcttttttaatattaggaaaaactattaaatgaatcattggcagagtccagccaatgtggccccagaragaaatgacagaaattaaaccaaagctatattcccagcaatgataataatccatgtctatggagaagaccattgtaaactgcctgtgccagcggtcctgt

SEQ ID NO: 50298 - DNA, 201 bp, Homo sapiens
cctcatggtgccttccctactgaacatgagtggagctgtctgctggtcttctcatgcacttccttaaagggactgccctggacacagtccttgctgcctcyccctgactatggctgactccgctagtgccttcacctttccctgcctcctccataactgcagggccctggagatgtgtcaggcaggggattgagaagtgct

SEQ ID NO: 50299 - DNA, 201 bp, Homo sapiens
atatttggggcctttaatttctatgtgtctatttttaatgaaattgagctcttattgcatattcttcccttctgcttgatgtgccataaacatttttatgytattaaatattctccaaaacataattttaagggctacatggcattagctcatgctataatttatttaaacattctgatctccaattgttgaacaattagg

SEQ ID NO: 50300 - DNA, 201 bp, Homo sapiens
tgagttttactcttgttgcccaggctggagtgcaatagcgcgatctcagctcaccgcaacctccgcctcctgggttcaagcaattctgactcagcctcccragtagctgggactacaggcatgcaccaccacgctcagctaattttgtatttttaatagagacgaggtttctccatgttggtcaggctggtctcagactcc

SEQ ID NO: 50301 - DNA, 201 bp, Homo sapiens
atttctcccaagaaaattctcaccaatgggtggtaaccacagaagcaaaattttaactcagtcaaaggaagaactgtctagtgattaagatagtaaattaytgggaggccaaggcaggtggatcacgaggtcaggagattgagaccatactggctaacacggtgaaaccccgtctctactaaaaatacaagaaattagccg

SEQ ID NO: 50302 - DNA, 201 bp, Homo sapiens
tgaggctggtaattccttaggcctaacgtcactgttactgatttccaaccaggaggctttgggccaacctgccctccccatcccaagatggggtgtgccasctccccatcccaagatggggtgtgccacctcacaacaccctcaaagatgtccctctgaatctgagaggatatcccatgagctactcaaactagatggagg

SEQ ID NO: 50303 - DNA, 201 bp, Homo sapiens
ggtggggacagggacatccgtctgacatgcccagagttagcacgatgcctgaatgtggtagacactcaacagacatccatacaatcacttcattgcgcagyaccttctcatatatctgcatcttattttcccgactcatataaaacatttgagaacagggaagaacatgtcacatttcttgtcctacagtctccaaaacag

SEQ ID NO: 50304 - DNA, 201 bp, Homo sapiens
cttgcctcagcctcccgagtagctgggactacaggcgcccgccacctcgcccggctaattttttgtatttttagtagagacggggtttcactgtgttagcyaggatggtctcgatctcctgacctcgtgatccgcccacctcggcctcccaaagtgctgggattacaggcatgagacaccgcgcccggctcttcctaagta

SEQ ID NO: 50305 - DNA, 201 bp, Homo sapiens
ccaaaacagcatggcactggtaccaaaacagatatatagaacagaacagaggcctcagaaataacaccacacatctacaactgcctgatctttgacaaacytgacaaacacaataaatggggaaaggattccctatttaataaatggtgctggcaaaactggctagccacatgtagaaagctgaaactcgatcccttcctt

SEQ ID NO: 50306 - DNA, 201 bp, Homo sapiens
aaatggtgctgggaaaactggctagccatatgtagaaacctgaaactggatcccctccttacaccttatacaaaaattaattcaagatggattaaagactwaaatgtaagacctaaacccataaacctagaagaaaacctaggcaataccattcaggacacaggcatgggcaaagacttcataactaaaacaccaaaagca

SEQ ID NO: 50307 - DNA, 201 bp, Homo sapiens
agcaatgcatcccttttggtgcagtgatatcagcaggtaacagcatacgtagtgagaggagaatcaaaggaagaattaggagttccgagttctaatcacarctcagccatttattgtctatgtgggctccaggtaaccacttagttttatggtcctcaatgtccccatctgtgaaatgattaatgacattacctgtgctta

SEQ ID NO: 50308 - DNA, 201 bp, Homo sapiens
gctaattgttacctccaataatggacgccctggttgccacatctacaattttgaagaaaagtagcaactaccaatctttgtaaagattcttttatcttttwaaaaaaattagtgattaaattaaaatttcttaacacactgtccaatctaaagaaaatacatcatcagaacaaatttttccatgcactaccattttgcagt

SEQ ID NO: 50309 - DNA, 201 bp, Homo sapiens
tctgcaccctgcacccataccaaccccagaccagcacctgttctggtcattaaccctggtggctacccattggttagggtggagggactgactcactttakccacaagtttctcagagtgggatttccacctcctcaaatgtaggcaatgcgctggggacacagcaagccactgcaccagtctctagctggaatgtcacct

SEQ ID NO: 50310 - DNA, 201 bp, Homo sapiens
actacctgtctcattatctgggtgtcattctagacttgatataaaacagttgttcagttcttagggggtacatcatagtttgaatcccactatggacagtragctcagccctagaataatggataaccatggacaacacaagctgcttcatactgttttcctgcttatggggaagagtggatcctggaattacagaagaga

SEQ ID NO: 50311 - DNA, 201 bp, Homo sapiens
gagtcaaagccacaaattttccacaccattactttattccagtgtttgccaaaccaaccaacagtcactatacacttttgctactggtgttattatttacytagtatgtttctttaaattgacttactttttaacataaacaaatgtattttaaagggaaactataaatcactatttcaaatagaaaagcaactaatattc

SEQ ID NO: 50312 - DNA, 201 bp, Homo sapiens
gtgtaatgcccctgccatgatacatcacttcaatctaatgatgagaaagcagatgatcccaattgagagacagtctgcaaaataactggcctgtactcttyaaaagtattaacgtcataaaagaaagacagatagactaagaaactcttccaaattaaaaaaagaaatgacaaccacatgcaacatgtgatcttggattga

SEQ ID NO: 50313 - DNA, 201 bp, Homo sapiens
tcttggcccacttttaagcctgactttgttaataactggaggagtcaaagccacaaattttccacaccattactttattccagtgtttgccaaaccaaccracagtcactatacacttttgctactggtgttattatttacctagtatgtttctttaaattgacttactttttaacataaacaaatgtattttaaagggaa

SEQ ID NO: 50314 - DNA, 201 bp, Homo sapiens
acaatctgaacactaaaacttttctgcaaatcaaaaatatgtttgcctgttttcctccatctcctctgttctcttcttctcaaactcttattacataggtrtaagacactctaggtctctcaacacttcttaccctcccttcctttacttctttctctttgctctgggataattccttgaattcattttcttatttattag

SEQ ID NO: 50315 - DNA, 201 bp, Homo sapiens
atgctattaagacagttggcaacatatcagtgatgtctgtaaattagaaaatgatatcacattagagttaactttctgatgttgatacttatactgccttkttcttagaaaacacacacacaccatctacaacttattctcaaatgattcaccaaagtaatacgtatatgtaggaaaataattttttaaatgcagtaaaat

SEQ ID NO: 50316 - DNA, 201 bp, Homo sapiens
gtaacatttgggttacaaaatcaacgtgcaaaaatcagtagcatttctacacgccaataacgttcaagctgagagccaaatcaagaacacaatcccacgtrtaatagctataagaagaataaaatacctaagaatacatttaacgaaagaggtaaaagatctctacaaggagaactacaaaacactgctgaaaaaagtcat

SEQ ID NO: 50317 - DNA, 201 bp, Homo sapiens
gtatttaaattatttttaccaccagtactttcatatcctcactcttaaatttttaaattcctgtttatccctcgacgggctagaaaatatttttaagtaawttttttttcaagtagactctatagaaaggaggaattatacttccctaagctgccagtatttgagcaaatctttctaacactctcagacacactcactgga

SEQ ID NO: 50318 - DNA, 201 bp, Homo sapiens
actctgggtgacatggctatatgagttattttcactattcttgcaacttttccataagtctgaaattatttcaaaagtaaaaaaattactgctaaaagaawaaatgtgtacattgatgcaaaactaacattgaggtctctccctctatgaaatagagctgggttaaactttgtcaccaacaatgggtttctgtcccagctc

SEQ ID NO: 50319 - DNA, 201 bp, Homo sapiens
tatcactgatacttaatatttctaatttttaatgtacagaaagtttaaaagtttatttttttaaaatttacctcactgtctcttccttcacttttttgctwgaaaggtcttgtctattctgagatcaacattttcctaagtgcctcatctatttgttttcacatgcgatcattttaagccatgaggatttattttggtgtt

SEQ ID NO: 50320 - DNA, 201 bp, Homo sapiens
ctttttaacgtcctatgtaaagagttcagagcaatacatgatgaactgcacacaaactctttcggccttggtaactttcctgaggaaatagatgtcagacytaatcacaactcttttgccattaagtcttaggggaaagtttctcttgaaactatattggtatttagaaaaagctttgaatctaaatgtcatgcatctctc

SEQ ID NO: 50321 - DNA, 201 bp, Homo sapiens
ccaccactcaaatcgcagctactttcaaacataactaccattgtaaatgattatgggaggctggtgaggtgaagctcaagtccacagaaccaagaaaatcyttagttcaaaacatcaccattaccctgaagatgattcctgcttgagtgaaggagaatttgaataaagcgtcccttccatgagtgtacgatatgtttattt

SEQ ID NO: 50322 - DNA, 201 bp, Homo sapiens
aggaaggagtgaaatgctgagatttgctctggttttatttcacctgttcagagacccaggggaaagtgtcagagttcaagggatggtcacaacatccagcytgactcccaccccttctgctgaggcagccatgagttagccccagcagtctccacagttcactggctacacctgccctcattagaagtccacagccctgtc

SEQ ID NO: 50323 - DNA, 201 bp, Homo sapiens; identical to SEQ ID NO: 8729

SEQ ID NO: 50324 - DNA, 201 bp, Homo sapiens
aatgtgaagttcaccatctgtcatgctgccttcatttaacctggccccctccagtctcccacatcttaccaaatggcatcgccatggtcacaatgactaargtgctaaacgttaccatccttgactgctgctcccttctttttcccctcagccaccctatctgccagttctgctaggcaatacacctgcctctctgttccc

SEQ ID NO: 50325 - DNA, 201 bp, Homo sapiens
ccacttatcttatggaaggaggtcctcaattctccaagaaccctggtgcttcagagtcagcagtgccattagcaaccacaggtggcgctgtcctttctcakgagagcaccaatcctacaactcctttggttaagattataaccctggccagccagtattcccccaagccaccctagtgggaggcctggggagccttcctaa

SEQ ID NO: 50326 - DNA, 201 bp, Homo sapiens
cataggaaaatggcatgagcaatcttttggagaaaatggatatattcattatccgactgcagggattatttcacaggtgcatacatatatcaaaactagtyaaattgcaaaactagtcaaacttcacagtttactatatgttaactataccttaacaaagctgttttgaaaaattaaaaagaaattaatgcatagtgaatg

SEQ ID NO: 50327 - DNA, 201 bp, Homo sapiens
cagcctgccatagatgggctgcctaccataggtaagcatcctcccacgggccagtgtcctcccgtagatgggcagcccaccataggtcagcatcctcccayaggccagcatcctgccatatacgggcagcccaccataggtcagcatcctcccatgggccagcatcctgccgtagacgagcagccaaccataggtcagcat

SEQ ID NO: 50328 - DNA, 201 bp, Homo sapiens
cttggggtcttctggagaagctcaaatgataccaggctataaccactggctccaatctgacagtcacctcccatctccaacacctctgtatggatctctargtttcttaagcaagaggccactttctttaacatgacctggaagagctggcatgatctggcacctacctacctattcttatcagggttcttaggtttaaca

SEQ ID NO: 50329 - DNA, 201 bp, Homo sapiens
ataccttaacaaagctgttttgaaaaattaaaaagaaattaatgcatagtgaatgtgttattagaactttaaaataatctaactaggtcctatattaattrtaacatctggattgtaggattttaaaagagaaaataaatctacaaactaggattgagtgactaattctagaaatatctgtttgtaagggtgtactttttg

SEQ ID NO: 50330 - DNA, 201 bp, Homo sapiens
tgtcctccaatggacaagcatgtgccctgggattcccatcctcccatgggccagcagcctgccatagatgggctgcctaccataggtaagcatcctcccaygggccagtgtcctcccgtagatgggcagcccaccataggtcagcatcctcccacaggccagcatcctgccatatacgggcagcccaccataggtcagcat

SEQ ID NO: 50331 - DNA, 201 bp, Homo sapiens
acatagagctagactaaatggatggggtgctgaggctgggcttccataccttaagtacctacgaatcatgtgagtgattaaaagatttcttaggtcaggcytaatttctaatcatctctcactcaagccagcatatggccactgtatgagttcaagagtgagcatttttttgaaacgcagttaagacttcagtttcctgca

SEQ ID NO: 50332 - DNA, 201 bp, Homo sapiens
aataaataaataaataaataaataaataaaaataaaagattagtaaattaatgaaagtaacaaattcttcatacctgaaaatattcaagaggaagtttgayggccactggtgggatgttattgaagagatgacaatgtctatgctgaacttaaactagatgagacctaagaattgaacagaaaatgtgatttctgtgcaaa

SEQ ID NO: 50333 - DNA, 201 bp, Homo sapiens
gtatgtttattatggcactattcacaatagcaaagacttggaatgaacccaaatgtccaacaatgataggctggattaagaaaatgtggcatatatacacyatggaatactatgcagccataaaaaatgatgagttcatgtcctttgtggggacatggatgaagctggaaaccatcattctcagcaaactattgcaaggac

SEQ ID NO: 50334 - DNA, 201 bp, Homo sapiens
ggggtatttatgtgacaacttcgtcagtcattggttgagggcttgtcccaaaagatgttcctacctccccacagcctggggaaaagccctgggcagaggtrtgggtacagacagctgcagcttaccagggacatgagggtttcaggctgaagggggatgtagcaacgtctgccccagagatgccttggaaattcattaaag

SEQ ID NO: 50335 - DNA, 201 bp, Homo sapiens
tggtaacagacctgagccacatccaggcctccaaactcccaggtcaaggctcttcccaccaagttaccttgaatcatagaacaaatgattggcctgtttargttctccaagactcttagaggccctgtgccaaagacaacctctcattactgtgacttctctgactggttctgacctgatttcaaggatccttgagatagg

SEQ ID NO: 50336 - DNA, 201 bp, Homo sapiens
gaaaattgcaaatcaatatataaatgtaagttgttagtgttaatctaattcaaaaaatccacactgagcctgctgagtgttgggagtaaaggataataacrgccacttggattattactctattgttctatgattgaatttcatcggagggatccagtcccactggtaaaagttcactattccaaataattaaaatttttc

SEQ ID NO: 50337 - DNA, 201 bp, Homo sapiens
caaatacagaagtttgcattgactcaactccacatccttccctagaccacagcttctgccatgggactctgtagaatctccctttaaagaggtgaagtgtrtttcctaccccttgactttggattgggccttgtgacatgttttaagcaatagaataatctagaactgacagtgccagtttggagcctaggccttaagagg

SEQ ID NO: 50338 - DNA, 201 bp, Homo sapiens
agcacttaatacatatttgttaaattgcattaaatgttaactcaccaatattattgcaagtaataccaggaactaaattatatgatgaccctctatcgacratgatcagaaactgcagcatgcacaaccctctgtgtaattcctagttctcaaccacctcataggtggatgccaccattgcctccttcatcatgcatgata

SEQ ID NO: 50339 - DNA, 201 bp, Homo sapiens
agttcctatggctgcaagcctggagagaatacgattcgagaggtgaataatccacaggcaaataactacaagctatttcttttctttaatgtctagaatcyctcaagttgctggaaatgcaattaggttcctagataggagaggacaaattatgttctttggttccgttcaaaatttggaacattatttatgttccagggt

SEQ ID NO: 50340 - DNA, 201 bp, Homo sapiens
catgatgagcactttagcaccagatcagactgaatactgagaatggggactttttaaaaatcactttgatagaccgtcagtcaaatgactatcacttaatrcaactcatgtactagaggaaactatttatttttacagaaacatactttgctttaaaaatagggcagaaatgaaaccttgcttaacaaaatgaaactactt

SEQ ID NO: 50341 - DNA, 201 bp, Homo sapiens
ttttcctttattaaactccacgccaagggtgctttaggaaaacaaacttcatacatatgcagaactgcttttagggaatgtgtatattagaatagcttgcyttgtgctcgatttgcttttgttggattattcctgtttaagcagagcaagcgtatttattctactgtgaaccatttaataattacatgcagtatctgagct

SEQ ID NO: 50342 - DNA, 201 bp, Homo sapiens
gtttctatctcatagaaccaaaaacctttaggtgaccaagccttacaaataattaacttggcaataacccctggctacagctgtggttcaaaatgctgctyctgctgagctgacatccattttcactttgtccctctcctcatgtgcctgtttcccaatcatactgtcttaaagccacagttctgggtgtctaaggcaggc

SEQ ID NO: 50343 - DNA, 201 bp, Homo sapiens
ttctgcatttccaactgaggtatctggttcatctcattgggactagttggacagtgggtgcaaggggtcggaggatttccctttcctagccaaaggaagcygtgacagactgtacctggaaaaatgggacacttctgcccaaatactgtgcttttcccatggtcttagcaaacagcagaccaggagattctctcccatgtc

SEQ ID NO: 50344 - DNA, 201 bp, Homo sapiens
gaagcccagaaaaaaaagtattaacttgtgtttctctcgatattcctaccccactaactatacctaagaatgctgttatctctgaaaaattcagaggttargagaacagaacacccttggggaagacaagttactatttcaaaatagtatctctgaaaaaaacagaaatccaaatatcgcatgggaagtcagtgggagaaa

SEQ ID NO: 50345 - DNA, 201 bp, Homo sapiens
tagggaattggagctgaggaggagctgaaaatgcagatttagcatcaagcacagacctacactcgctctttctctccggtacacacagctccccacattckcacccctgcccgcgcgccgggccgcctgactgcacggcttcccctccagccagatgctggagaacacacactgattcgctgctttccaagaccctgttca

SEQ ID NO: 50346 - DNA, 201 bp, Homo sapiens
agtgaagggggttgtgctcacagtctgtatcagaatcagtcagggttctccagaaaaacagaagcaatagggtgtatacatacaggttgtatatgtaaagrgagatatttattttaaggaattggcttatgcaattgtgaaggctggcaagtccaaaatctgcagggcaggccagcaggctggaaatgccaacaagaattt

SEQ ID NO: 50347 - DNA, 201 bp, Homo sapiens
tctgcagctcttttttgtcgtttatgaacatgatgactttaaagagtactggtcagttatgagtttgtctgatggttctacctgaataaatacacgttatrtatttttggtgagaaaatcacatgaacaatgtgcccttcttagtgcatcatagcatgactcatcactggtgaagttaacttagatcgcttgggtaaagtg

SEQ ID NO: 50348 - DNA, 201 bp, Homo sapiens
gaaatatctgtttgtaagggtgtactttttggttcactccagtatcataagacaataaagtaaatatcatatagtgaaattccctaaaaatagacaatgcyacgttttgccaaaacatctatgaaagtatagaatattttcaaaagagtggaaaatatctgagagcacagccataaatttataactgttcctctagcatgt

SEQ ID NO: 50349 - DNA, 201 bp, Homo sapiens
actgagatcattttaccttgcacacaatccagggaaatcagtaatcatctctgggcagatatcagtaatgtgcaaaacccatttcctacttgacttggaargagaaagaaatgttaggaagagtgaaaaatgaatggggaaaaagaacacatcagttcttctccacatggtctctcatcctccagcagcctaccccagacc

SEQ ID NO: 50350 - DNA, 201 bp, Homo sapiens
gagaaataacacaaggtagagaattcatgaatagataatcactttccgcagacaataagcaatgttccaataaaccctgagaaataactaattacttttcyaagtgagcaaacattattctgtagtcccgtagacctgaaaaggaatctaaagatagtgaatagcaatgtgttcctaattttcaaaagaagattaaaaggg

SEQ ID NO: 50351 - DNA, 201 bp, Homo sapiens
ttgagagattgctgtccacatacttcaggcccagaaaaggaaggagtgaaatgctgagatttgctctggttttatttcacctgttcagagacccaggggamagtgtcagagttcaagggatggtcacaacatccagcctgactcccaccccttctgctgaggcagccatgagttagccccagcagtctccacagttcactg

SEQ ID NO: 50352 - DNA, 201 bp, Homo sapiens
tgccatatacacaaaaactaaacaaaatattatcattgtaattaagttgaacaggatgcattttgctactgttaggcattcgcattgtgagtgctacagtyttttcttagcctgacatttttctgcaaatgtgttacttccaaaatgagggcagaatttgcatgaataacgttttggtactaaacactgtatttattagga

SEQ ID NO: 50353 - DNA, 201 bp, Homo sapiens
ctgcaaacacgtcatttcatcaaaggttctttacaaagcagatgacattgaaaagcagcctcacatttttcaggtttagagactagatttttatggacttsgaaacttggaagtcagctcaccattctggcatagtcttcctgccaagcccaaattctgaaatcagtgtgggagcaatcagagggtgacatccatctcaga

SEQ ID NO: 50354 - DNA, 201 bp, Homo sapiens
ccagacggacttctaatgatcgtcaagcaccatatgattatgagagagggcaggaggggagcaccgcgggagagaaggagagagagggaatgagggcgtakgctgagatgaacggcagtttatctcccagtttctgaatatgcttagcattccatcataatctgcatacatgtggaatttaaggccagagagaacactgga

SEQ ID NO: 50355 - DNA, 201 bp, Homo sapiens
ttccattccccctgaaaagggagagcagtccatcccaagtaaagaatagtttaatggatgttaatttttaaggacaacttagagaatcaacatgagaaagyttcttctcccaacagaagcaaagcaaagcaattaaaacctattgtgtggaaagagacccaaataattgtctattagggagaaaaggaacatgatagagtc

SEQ ID NO: 50356 - DNA, 201 bp, Homo sapiens
gacacagtccttgctgcctccccctgactatggctgactccgctagtgccttcacctttccctgcctcctccataactgcagggccctggagatgtgtcargcaggggattgagaagtgctgcattgcattttctccaaggctctgatgtatctggggctgttcctcacagagagcaagtgtggcagggatcatggcctcc

SEQ ID NO: 50357 - DNA, 201 bp, Homo sapiens
taagatagtctgtggttctgtatttttgttttgttgcatgtgttcccccattagaatgtcagccccaggaggatgaggccacggggatctgacctgtcttkttcacctctttatccgcagcacagcaccatggctggaaccaagtgagtggtcagtaggtatctgtgagatgactgactggctgaggattgaacacttggc

SEQ ID NO: 50358 - DNA, 201 bp, Homo sapiens
cagcctcccaagtagctgggagtacaggcgcacaccaccatacccagctaaattttgtatttttagtagagacggggttttaccatgttggccaggatggwctcgatctcctgacctcgtgatccacctgccttggtctctcaaagtgctgggattacaggcataagccactgcacctggcccatgaaaacactttttaag

SEQ ID NO: 50359 - DNA, 201 bp, Homo sapiens
acctagaaaaccccatcgtctcagcccaaaatctccttaagctgataagcaacttcagcaaagtctcaggatacaaaatcaatgtgcaaaaatcacaagcrttcttatacaccaacaacaggcaaacagagagccaaatcatgagtgaactcccattcacaattgcttcaaacagaataaaatacctaggaatccaactta

SEQ ID NO: 50360 - DNA, 201 bp, Homo sapiens
aaacaaacctgccctggaaacaatgcttataattataatcgtggattctatctgttcctcacagggaatgcttaaaatatcaatttaaatgcaaatgaatyttatcattccaaattagactcatcccattgtgttgaaattaatatagaaaataacaccgaacaccaaattacaagtaattaatattgacactgtgaaaag

SEQ ID NO: 50361 - DNA, 201 bp, Homo sapiens
ctgagttcaaaattgggcaaagatctgtaaagtggtaacgatatttcagaaagcctgcatatgggctggaatggagggaacagacagggcagggtctttargaataatccattgaaagggttgacagtcaatatggtttggctctgtgtccccacccaaatctcatcttgaattgtactcccataattcccacatgttgta

SEQ ID NO: 50362 - DNA, 201 bp, Homo sapiens
actagatttttatggacttcgaaacttggaagtcagctcaccattctggcatagtcttcctgccaagcccaaattctgaaatcagtgtgggagcaatcagwgggtgacatccatctcagagtcaaagaaacaggggacttctgattccttgtaatttctctagaagtaaatcctcttttccttgactggcactcttctctt

SEQ ID NO: 50363 - DNA, 201 bp, Homo sapiens
catcttagaatccagtaatctattctttgggtctgaggaaaagcacttaaatctgtatttaagtgactacatactatttaaaaataaactatttgaggccrggcctggtggctcacacctgtaatcccagcactttgggaggccgaggtgggtggatcacctgaggtcaggagtttgagaccagcctgaccaacacagcga

SEQ ID NO: 50364 - DNA, 201 bp, Homo sapiens
atcaaagtaagtagtttcctagaatcttatgtttcattataatgggcagagtttaccttataaaattagtgtacacgtttgaatgtattaaattttatttyacacataaaatttttatcttttaaaattcctgtttatatttgctaacaaggcatatactttgttctctctgaattatttctgagttataagtagtttgag

SEQ ID NO: 50365 - DNA, 201 bp, Homo sapiens
ttcctcccaacactccaatggatcatccagcacatcctcccaagtgagcacaatccacttttgagacctttgcactaaatacctagtctgtagccctgccytcagtgtaatcagcaaaagattctgtattaaaacataaaatcctctgtccagctagatgttaagatctctgtctttaagggagataaaacagaataatag

SEQ ID NO: 50366 - DNA, 201 bp, Homo sapiens
cagaaactgtagtatattagttacctattgctgcatctcagattacccccaaaacatggcagcataaaacaaaatacatatatatattttgtttcacaccrtttttatgagtcagaaatttaagagcagtttggctgggtggctccgtgtttctcgtgaggttgcagtcagcatgttggccatgactgcagtcaactgaag

SEQ ID NO: 50367 - DNA, 201 bp, Homo sapiens
ccccaaaacatggcagcataaaacaaaatacatatatatattttgtttcacaccgtttttatgagtcagaaatttaagagcagtttggctgggtggctccrtgtttctcgtgaggttgcagtcagcatgttggccatgactgcagtcaactgaagactcaaccagggctggaggatcgacttccaagatggttcacatggt

SEQ ID NO: 50368 - DNA, 201 bp, Homo sapiens
tctagcctcagaagtcacacaccacaattttgaaatgtcctattggttatatgggtcagccttgttcattgtaggggactgtatacaaggtcatgaatatyaggaagcaagaatccctaggatcccaactgggaggcggggacaagtggctgaatagagcagacatagtttctaccctcaaggaccttagcaactagaggg

SEQ ID NO: 50369 - DNA, 201 bp, Homo sapiens
aatgaacttgaaagaggaccccaagccctagatgagacagctccagtgacaccttgatttcagccaggtgagaccttgagcaaaagccccagttaacccaygtccagaaactctgagataaatttgtgttgttttaagccactatgtttgtaataatttgctatacagcaataaaaaaactaatacaaccttcttgattat

SEQ ID NO: 50370 - DNA, 201 bp, Homo sapiens
aaaagaacaaagctggaggcattgcattacccaatgtcatattatattgtaagcctacagtaatcaaagcagcatggtagtggtacaaaaacagacacatrgaacaatggaacagaaaagagaactcagaaataaagccacacacctacaaccatctgatcttcaagaaagtctacaaaagtaagcaatgggaaaagggct

SEQ ID NO: 50371 - DNA, 201 bp, Homo sapiens
tttgcccaagtcctatatccaaaaaaaaatgatgtttttcatcatttcatatagatgaaaaacaacattaccagcccctgtttcaaaggcaaaatgcattstgcattgtatatgagttgggtaatgtcaagtgtctgtgattgcagcgtgggagttgttttggtctgttttattttgacttaagtcaggaaacaataagta

SEQ ID NO: 50372 - DNA, 201 bp, Homo sapiens
ctcccatagacagtgcaccctccacgaagtcaccgagcagctgctaccgctgtgtctccgccagtgccatttctgcttcctcgaattttaaattggccagrataatacaacaaattaaggtatttgctggtttctattaccattttttggtaaatcactttttccctattaatgcatgggaaagagattgccagcaaacac

SEQ ID NO: 50373 - DNA, 201 bp, Homo sapiens
caaagaggagatggataagagacttttatcggggcatgcactgtttgccatagatcccaccattcccagttgtctgatggctgcttcacacaaacatcacytacctgactccttagggatttgaagtttgcacctcctacatttgcttagtaaatacttgagagaagcagtgaggagtgggcaagaaggaaatcctttttt

SEQ ID NO: 50374 - DNA, 201 bp, Homo sapiens
gcaaatttgtcaaatgtatatttctgaaaatattaaagctcgagaccacatcaaggagtcgtaacactgtctcctgccttcaggccttttgtgtggtccawagttactgtgggcaccttcctgttgcaggggatggaagctggcggacaggtcccctgccccatatagctcacagtctaggaggagaaaaagacagggagc

SEQ ID NO: 50375 - DNA, 201 bp, Homo sapiens
actcttggcctcaagcaatcctcctgcctcagcctcccaaagcaccgggattacaggcgtgagccaccatgcctgaccaaaattgacggtctttgaattargatccagaacaagggttaacaacatttaaaaatatttgtctttaaatattctgatgcctttccctctgaagacttcgggaggcaagtgggagaagaaggc

SEQ ID NO: 50376 - DNA, 201 bp, Homo sapiens
gtattaaagaggcttagctagctttgcttctttactgcacttacatctcaggagacactcattgagaggaacatgtcattttggccaagaacagcatttarggactttctagcttctctggaaaattgtcctgtcaagtacaccccagtctaaccattcctgccgtaatatctggcatagagcctccatcttttaatatcc

SEQ ID NO: 50377 - DNA, 201 bp, Homo sapiens
ggcttttctaggagaaagattatttgccaaagagctgttatggttaaaaggaagatagagagagagaaagaatgtagttaaagcaccctgaacttcagagrtgctccctaaatagtctttctctcttcctcttaaaacagaaaccttcagggacacctaacataagatgatatctgcaaaacatatatctctaaaaaaagc

SEQ ID NO: 50378 - DNA, 201 bp, Homo sapiens
attatttatttattgtatatttatttttatatatatttatttatttatattatatatatttatttatttatttattatttattttagagacagagtcttgstctgttactgaggctggagtgcagtggctcactgcagcccaactcctgggctcaagccaccctcctgcctcagccttccaagttgctgggactacaggtg

SEQ ID NO: 50379 - DNA, 201 bp, Homo sapiens
taggagaaagattatttgccaaagagctgttatggttaaaaggaagatagagagagagaaagaatgtagttaaagcaccctgaacttcagaggtgctccckaaatagtctttctctcttcctcttaaaacagaaaccttcagggacacctaacataagatgatatctgcaaaacatatatctctaaaaaaagcagacaaaa

SEQ ID NO: 50380 - DNA, 201 bp, Homo sapiens
cattacctgtgcttattacatggggttactctggcaatcaaatatgatagaaagaaaggttcgaaaactgtggacttttactattgttcatagagattcargctagagtcttaagttttgtgctgacaaatctaaaagtaacctgactaaaaatgtgtagcaactgagtttaaaagaagctcaaataaaattatctttaaa

SEQ ID NO: 50381 - DNA, 201 bp, Homo sapiens
aagattttgacgggaatatatttagtaacagtatcactgatgttcagtctcaagcaggggcctgtatctactctggggctcattatattctgagtgacaaygggtgcttagtaaatctcctttgattatgatgatcaaccaagtcactcagagtgtctttaatagataatgagaaattgtaccagagttggggttttctaa

SEQ ID NO: 50382 - DNA, 201 bp, Homo sapiens
gagttaagaaggaaagaaggaagcaacctcagccactggttttagagacaaagtcattgttgaaataggaggagtcaccctagcacagtggaagaggagaygagtgttaatttgggtccccagatgtaggccctggaataaggacttaaatgcaagtagtttacttaaagagtgattctacaaaatactggtaaaggagtg

SEQ ID NO: 50383 - DNA, 201 bp, Homo sapiens
gcatatacatagcagctttatatttgcaaaacttggaaataattccaatgcccgtcaacaagtgaatggataaataaaactgtgatgtgtttatacagtgraatactatcccacaacaaaacaaacaaactgctgctgcatacagtacaataggcaaatctccaaatgttgttagctaccaacaaagacaaatgcaagagt

SEQ ID NO: 50384 - DNA, 201 bp, Homo sapiens
atcatatggtgagacaactcctcaaggtgatgacagtgtccactatcttgattggcatgatggtgactcagatttacatactgctaagatgcagcatgcaygcttaagatcacatatgctactgtaaattatacctcaattaaaaaacatgatttaaagcacaacctataagcaaaagagccagtttagaaatcagttacc

SEQ ID NO: 50385 - DNA, 201 bp, Homo sapiens
gtagataaaataaaaactgcaatttcccttctctctcctctccttttcctcctctatacaacccactcactttccaattttggtgacgtggcagttctgcrtggatctttccagattttttttctcccccaactgcaatcatacagtacaccgtatcatgcaacctgctcttttatttaacaacatattctctccaacagt

SEQ ID NO: 50386 - DNA, 201 bp, Homo sapiens
atttctgagtcaagtagtacatgcaatattaattttaataaaccttatcaaattattctctgaaaagattgaatcaatgcatagtcctcccaggagaatcycttctcattttgatctcaaagacaggaaaaataaagttgagagaatgctgaaatattcaaagattctccgatgcccttgaaaagcagaagtggagctgac

SEQ ID NO: 50387 - DNA, 201 bp, Homo sapiens
acctgcccagtggtcattttagtcaattttggggggaaacagttcttttgaataggtcccctaaaaaaggcttgaaagaagaattagtacattccaaagcwgtgattagaaatcatcataattttctaccaggagaagagcactttattattacttaaaattactctagtccaatagccaattgctatattttatgttaac

SEQ ID NO: 50388 - DNA, 201 bp, Homo sapiens
ttcaatcactattaagcacagttgagttaaatccagtaagcattctgttgggactaaagattttctgttcaaagcacacctaatgatttctctcttgtttsaattgtattaaatttatgagacctctattttatctctagtgtcagtttatttcatttccattttccacttgttttcctaaaataacaacaaaatgcaatt

SEQ ID NO: 50389 - DNA, 201 bp, Homo sapiens
agactggagtgcagtggcataatctccgtgcactgcaccctccaccccactgaggtcaaccaatcctcctacctcagcctccctggtagctgggactacargcatgtatcaacatgcctggctaatttgtgtattttttgcagagacggggtttcaccatgttgtccaggctggtctcaactcctggactcaagcgctcca

SEQ ID NO: 50390 - DNA, 201 bp, Homo sapiens
catttttaaatttaagtttcattaaagatttggaaatatattgctttttttctctgacttctcccagaaaagtttttgggatttgggaattttatgtgtargttttccacaatggagtttccttcccatgtatgtgtgtgtgtattttaatatatatataattatatgttacacataccatatgcaatatataaatattac

SEQ ID NO: 50391 - DNA, 201 bp, Homo sapiens
acatgataagctggggaaagaactttgaattgactctgaatgagatgtggcttctgtgcctatgggcaaataatagacaatggggtagaggtatggatgakggacaactggactagagagatccatgcaaggtgattgcaatatttcagaagagaaaagccagtggcataggccaggatagaagtggtggaggcagtgaga

SEQ ID NO: 50392 - DNA, 201 bp, Homo sapiens
gaagaggctctgggtccgccggtggcgcgcgggcgggtcttgcggaaaggaacttgttgctctggaaagcgtgggtggagcaggggaaagaaggcgccggsggagggagcaccccgctgtggttttggcccgtggcctgccggctgttttgagagacaccaacacaataaagaagccgaccttccttcttcactccccccc

SEQ ID NO: 50393 - DNA, 201 bp, Homo sapiens
tcccccggagaaagaatagtttcctacagacgaggctggacgtttggacactgcaattcacctcggtgtttctcccaccccgcgccgggaggacttccctyccagggacttcggtccctgctcctctccgggaacaacggcttcctgactctagatttggaaagaaactggtctctaaaatcggggcggaacttctgcgcc

SEQ ID NO: 50394 - DNA, 201 bp, Homo sapiens
gatctcacaagaactcattcacggggagcaggcatcttccatggcaggagcaggagcaaaagaaagagtgaggggaaggtgctacacacttttaaacaacsagatctcacaagaactcattcactgtcatgataatggcaccaaggagatggtgctaaactgtccatgggaaacccactcccctgacccaaccacctccca

SEQ ID NO: 50395 - DNA, 201 bp, Homo sapiens
ataaacattcagaccacagaaggattgctggggtggtgtggacaagagcagaaagcaaacaaaagccagcgagtgccttcttcctcctccagactttcagycttcccccagctcccctctaacagcacctcccagggagcagctggctaagcaggacctggctgcagagtcccagccccagcatcactgggtagagagggg

SEQ ID NO: 50396 - DNA, 201 bp, Homo sapiens; identical to SEQ ID NO: 8728

SEQ ID NO: 50397 - DNA, 201 bp, Homo sapiens
atgttaactgaattttgcggcagactgttggtgcatcctctgtatcagggagtctgcaaactatagccaaacccagtacgcggtctgcttttgtaaatacagttttgttggagacaactgtgcttgtttgttgttgtattgtctatggctgatttcatgctaccacaagagagctgagtagttacagcagaggctgtgtgg

SEQ ID NO: 50398 - DNA, 201 bp, Homo sapiens
aataagaatacataaaacccatgctcctgcctccaagcaggacaactgtgtggtggcgtagatgctccaaagccagcatggcctgtgacccccaggcacaycccagtgtccaaggcttctaggaaaatgtgtgattcttaacacaagtttgtgtgtttgtccctactcccacctgtctttcggctttccaaggtgcatgga

SEQ ID NO: 50399 - DNA, 201 bp, Homo sapiens
tttaattggctcatggttctgcaggctgtacaggaagcatagtggcttctgcttctggggagacttctggaagcttccaatcatggcagaaggtaaaaggrgagcaggcatcttccatggcaggagcaggagcaaaagaaagagtgaggggaaggtgctacacacttttaaacaaccagatctcacaagaactcattcacg

SEQ ID NO: 50400 - DNA, 201 bp, Homo sapiens
gatgttaactgaattttgcggcagactgttggtgcatcctctgtatcagggagtctgcaaactatagccaaacccagtacgcggtctgcttttgtaaatacagttttgttggagacaactgtgcttgtttgttgttgtattgtctatggctgatttcatgctaccacaagagagctgagtagttacagcagaggctgtgtg

SEQ ID NO: 50401 - DNA, 201 bp, Homo sapiens
gaggagatggataagagacttttatcggggcatgcactgtttgccatagatcccaccattcccagttgtctgatggctgcttcacacaaacatcacctacytgactccttagggatttgaagtttgcacctcctacatttgcttagtaaatacttgagagaagcagtgaggagtgggcaagaaggaaatcctttttttctt

SEQ ID NO: 50402 - DNA, 201 bp, Homo sapiens
aaacacctcagactgggtaaattataaagaaacgaggtttaattggctcatggttctgcaggctgtacaggaagcatagtggcttctgcttctggggagayttctggaagcttccaatcatggcagaaggtaaaaggggagcaggcatcttccatggcaggagcaggagcaaaagaaagagtgaggggaaggtgctacaca

SEQ ID NO: 50403 - DNA, 201 bp, Homo sapiens
tgacgtgctcgccatgttagagagtgaggcttgtgaaatagtgtccttcaggcacaacatcctttggccaccggggacaaggaaggagttttggggcccakattttgactgtgcatggcccaaccccttcattccataatcgcagtgggtggaaagactcaggtcagcttcactagcactctaagctccatgccacagaat

SEQ ID NO: 50404 - DNA, 201 bp, Homo sapiens; identical to SEQ ID NO: 8746

SEQ ID NO: 50405 - DNA, 201 bp, Homo sapiens
aatcacaacaaactgtctctcagaccacagtgcaatcaaattagaactcaggattaagaaactcactcaaaaccacacaactacatggaaactgaacaacytgctcctgaatgactactgggtacataacgaaatgaaggcagaaataaagacattctttgaaaccaatgagaacaaagacaaaacataccagaatctctg

SEQ ID NO: 50406 - DNA, 201 bp, Homo sapiens
aaaaaagagagagataagtaacttactcaggctcacacagccagtgtgggaactaaacccaggtctgattgatcaaccccaaagcccttgccctttccgcyacctgaagctgccctcaaaatcccttgtaaggtgcacccaccactgcttatcctatctcctcttcactctgccctcaggaaaataccatccactggcaag

SEQ ID NO: 50407 - DNA, 201 bp, Homo sapiens
gagctgaaggttgcagtgagctgagatcacaccactgcactccagcccgggcaacagagtgggaccctgtctcaaaagacaaaaaaaaaaaaaaaaaaaaagagagagataagtaacttactcaggctcacacagccagtgtgggaactaaacccaggtctgattgatcaaccccaaagcccttgccctttccgccacctg

SEQ ID NO: 50408 - DNA, 201 bp, Homo sapiens
agcaagaccctggatctgttttctgtacctatagttttctctatgataataacaaaataataataattttgttaatgttcagagcatgagtgagctccacytgacaactcttataatgtcaaatgatactgacgtcaacaaaacaacttagacaattcttgaaatttgcttatttatctgatacatttgttgagagtctat

SEQ ID NO: 50409 - DNA, 201 bp, Homo sapiens
ggagctgaaggttgcagtgagctgagatcacaccactgcactccagcccgggcaacagagtgggaccctgtctcaaaagacaaaaaaaaaaaaaaaaaaaaagagagagataagtaacttactcaggctcacacagccagtgtgggaactaaacccaggtctgattgatcaaccccaaagcccttgccctttccgccacct

SEQ ID NO: 50410 - DNA, 201 bp, Homo sapiens
tggagaactatacatttacttcaacattttaaacattctgttaatgaatatgcacatgtgtgcacgcaaacacacacacacacacacacacacacacacasacagagagctatgggaatatgctgcacaaatctctgacttcagggaaaataattgaccaaggcccccagctgctgcactctgaaatctgtcactgtgcca

SEQ ID NO: 50411 - DNA, 201 bp, Homo sapiens
aggagctgaaggttgcagtgagctgagatcacaccactgcactccagcccgggcaacagagtgggaccctgtctcaaaagacaaaaaaaaaaaaaaaaaaaaagagagagataagtaacttactcaggctcacacagccagtgtgggaactaaacccaggtctgattgatcaaccccaaagcccttgccctttccgccacc

SEQ ID NO: 50412 - DNA, 201 bp, Homo sapiens
cacacacacacatatgtatatatatgtatattctgcatatcatattataggatgatacatatgtatgttaatatcaaagggttcaaagaagggagaagacrtgggaagtggctcttagtctgccatttgcactgagtcctctgtagctttaagaagaaatatcgatttatttcattggttgtgcttgtttttgacccaaat

SEQ ID NO: 50413 - DNA, 201 bp, Homo sapiens
atgtgccaaggaccatcctggacactaaggatataaatatgctaaatataatttctctacccttgaagaactggtaccctccttttcaaaaatggaacacmcccacatgccagttcccagatgaagggacagcaagaccagcactcagaagctccctgtatccccttccagtcactgccccacgagactgaccactaacat

SEQ ID NO: 50414 - DNA, 201 bp, Homo sapiens
aaacaaaccagattgggcagatactcttccaaatctactgcttaagtttcaatctcagctttgaagcccagaaaaaaaagtattaacttgtgtttctctcratattcctaccccactaactatacctaagaatgctgttatctctgaaaaattcagaggttaggagaacagaacacccttggggaagacaagttactattt

SEQ ID NO: 50415 - DNA, 201 bp, Homo sapiens
gtgagccaatatcatgccactatactccagcctgggtgacagagcgagactccatcaaaaggagagaagaagaagaagaagaagaggaagaggaagaagargaaggggaaggggaaggggaagagaaagaggaggaagaggaagaagaagaagaaagggaaggagaaggggaagggggaggaggagagaggtttaataggc

SEQ ID NO: 50416 - DNA, 201 bp, Homo sapiens
taacactaagtttattcctctccaaaattcaatgagttatgattccactctctgtaagtgttagtgttagtggtaatatgcaaaactgattttgtgtgcarggttaagtagcagattgacttcgcatttggtggccagctgtgtaccctaatttttatctattttcttaataaatttaattacatttcataagccctgaga

SEQ ID NO: 50417 - DNA, 201 bp, Homo sapiens
ctgtctcagtccatttgggctgctgtaacagaatgtcatagactgggtaccttataaacaacacaaatttatttctcactcttctggaggctgggggatcyaagatcaaggtgccagcaaattcagtgtctggcaaaggcccacttcctggttcatagatggcacctcctcactccgaactcacatgctagaagggatgag

SEQ ID NO: 50418 - DNA, 201 bp, Homo sapiens
catatgtcactaatggtcctgacacagggggattgaggatcacagtgagaactcctgactaggataacacagaggctccactgatgcctccctcagcatcytgagctcccccatcatgacagccctcacattttcaatactgagttgtccctctgtccccctaggctatcagctggtggggacagggacatccgtctgaca

SEQ ID NO: 50419 - DNA, 201 bp, Homo sapiens
attttcccttgacagagaagacactactatttattggaacatttttctccttaacagcttccattctcagaacatgaagccatgtttcaaaaattgacttyctgttggaaaatatattctctgggtgtgtctttttttacacttatttagataagttcgtttgatctagctaagtgtgaaaaaagacacacacagagaata

SEQ ID NO: 50420 - DNA, 201 bp, Homo sapiens
tacaatccatcctggagaaaacctacacagtacaaagacacatgaagattgggagtggacatattactgtggaattgctctttgttttcctttctttcttytctgaaatatttttgggggccaggatgaggagccttaggatttatttttctgcattagaacatgcactaaaggtgagccagttttctttaattcagttca

SEQ ID NO: 50421 - DNA, 201 bp, Homo sapiens
agagggatgaccatgtgaggaaacacagggagaagacagccatctgcaagccaaggagaggtgcctcagaggaaacaaaacatgccaacaccttgatctcrgacttccagcctccagaactgtgggcaaataaatttctgttatttatagccacctgttctcacagccctagcaaactaatataatcggttcacagtcatc

SEQ ID NO: 50422 - DNA, 201 bp, Homo sapiens
tcactaacagaagcatttccagtgactccagaatctttttaacgtcctatgtaaagagttcagagcaatacatgatgaactgcacacaaactctttcggcyttggtaactttcctgaggaaatagatgtcagacctaatcacaactcttttgccattaagtcttaggggaaagtttctcttgaaactatattggtatttag

SEQ ID NO: 50423 - DNA, 201 bp, Homo sapiens
agctcatgcctccctccacagcaccctctgccctggtctccatcccagtgaagggggttgtgctcacagtctgtatcagaatcagtcagggttctccagaraaacagaagcaatagggtgtatacatacaggttgtatatgtaaagagagatatttattttaaggaattggcttatgcaattgtgaaggctggcaagtcca

SEQ ID NO: 50424 - DNA, 201 bp, Homo sapiens
agataccatctcacaacagtcagaattgctgattaaaagtcaaaaaataggctggatgcggtggctcatgcctgtaatcccagcactttgggaggccaagrcgggcggatcacgagtcaggagattgagaccatcctggccaacactgtgaaaccctgtctccaaaaaaaaatacaaaaaaaaattagctgggcgtggtgg

SEQ ID NO: 50425 - DNA, 201 bp, Homo sapiens
caggagctgaaggttgcagtgagctgagatcacaccactgcactccagcccgggcaacagagtgggaccctgtctcaaaagacaaaaaaaaaaaaaaaaaaaaagagagagataagtaacttactcaggctcacacagccagtgtgggaactaaacccaggtctgattgatcaaccccaaagcccttgccctttccgccac

SEQ ID NO: 50426 - DNA, 201 bp, Homo sapiens
gatactgcttatgaatctgtcgttctttaaacaattgtttgcactaattagtcactgaattttctcaattaaaaataatgtgctgaaaagaagtgaagttrcctcctgagtttatgtcacttatgtgaattcagtgagctcagctataaatggaaaagtgaaaaagaagagggaaataaaaagggcggcacttgagctcac

SEQ ID NO: 50427 - DNA, 201 bp, Homo sapiens
ctcctcctcatcttatttctgtagctcaggataaaaagataatctccaaaggaggcctaaaaaacagccacattaattaaaggaaagagattttttttttytaggaagtgcctaataactaacggacaagcaaaggagactcattagtggaagtatttcctttgaaagggcacacacgctgtgaaaaaaaaaaaagaaagg

SEQ ID NO: 50428 - DNA, 201 bp, Homo sapiens
ccaggagctgaaggttgcagtgagctgagatcacaccactgcactccagcccgggcaacagagtgggaccctgtctcaaaagacaaaaaaaaaaaaaaaaaaaaagagagagataagtaacttactcaggctcacacagccagtgtgggaactaaacccaggtctgattgatcaaccccaaagcccttgccctttccgcca

SEQ ID NO: 50429 - DNA, 201 bp, Homo sapiens
agaaattaccatcagagtgaacaggcaacctacagaatgggagaaaatttttgcaacctactcatctgacaaagggctaatatccagaatctacaatgaastccaacaaatttacaagaaaaaaacaaacaaccccatcaaaaagtgggcgaaggatatgaacagacacttctcaaaagaagacatttatgcagccaaaaa

SEQ ID NO: 50430 - DNA, 201 bp, Homo sapiens
cctgtaaccctggctactggggaggctgaggcatgagaatcacttgaacccaggagctgaaggttgcagtgagctgagatcacaccactgcactccagccygggcaacagagtgggaccctgtctcaaaagacaaaaaaaaaaaaaaaaaaaaagagagagataagtaacttactcaggctcacacagccagtgtgggaac

SEQ ID NO: 50431 - DNA, 201 bp, Homo sapiens
cagctataactgataggaagaaaataaaactcgtgactcctctcaatacgaagtctgatttaaataaaaaactaagtgagaattgatactgcttatgaatstgtcgttctttaaacaattgtttgcactaattagtcactgaattttctcaattaaaaataatgtgctgaaaagaagtgaagttacctcctgagtttatgt

SEQ ID NO: 50432 - DNA, 201 bp, Homo sapiens
agtggcatttaaatatagacctgaaggagatgaggaaggtattcatgtggatatctggagaaagggcactccagacagaggaaccaccaaggaaaaaggcytggaatccaagacacacctggtgtgttccaggaacagcaagaatgcgagtaaagctgcaaaggaatgagccaaggacagtggggaaggagatgaggttag

SEQ ID NO: 50433 - DNA, 201 bp, Homo sapiens
aactccgtctttactaaaaatataaataattacccgggcacagtggagggcgcctgtagtcccagctactcgagaggctgaggcaggaatggcgtgaaccsgggaggcggagcttgcagtgagccgagatggcgccactgcactccagcctgggcgacagagcaagactccgtctcaaaaaaaaaaaaaaaaaaaaaagaa

SEQ ID NO: 50434 - DNA, 201 bp, Homo sapiens
acccagagagagagaaggtgacttccctggggccacacagctataactgataggaagaaaataaaactcgtgactcctctcaatacgaagtctgatttaartaaaaaactaagtgagaattgatactgcttatgaatctgtcgttctttaaacaattgtttgcactaattagtcactgaattttctcaattaaaaataatg

SEQ ID NO: 50435 - DNA, 201 bp, Homo sapiens
tttgggaggccgaggcaggcggatcacaaggtcaggagatcgagaccatcatggctaacacggtgaaactccgtctttactaaaaatataaataattaccygggcacagtggagggcgcctgtagtcccagctactcgagaggctgaggcaggaatggcgtgaacccgggaggcggagcttgcagtgagccgagatggcgc

SEQ ID NO: 50436 - DNA, 201 bp, Homo sapiens
atctttgcacagtgagatgttcaggaaatgactgagcatgtcaaatgaatgaatgattactattttttcttcagggttttaatccatgtaatagtattgcycttctcattttatattttcctccgtatcccaaaatttgtctccattaggaaataaaagtactatatagtcttctccctagcacctcttttacatacattc

SEQ ID NO: 50437 - DNA, 201 bp, Homo sapiens
ttattaacaagtgtgtgttgagccctatgaagatgaggcacattgaaaggggttgattctacagacagaaagataacaggttcaagtttatgcccaaggamaagcacacttatagttctatagttctatagtctagtttataagaattcatacaatctgaggtctctattttgctattgcaaatgtctactttatgtgttg

SEQ ID NO: 50438 - DNA, 201 bp, Homo sapiens
tatgaaattacagcctttcagaacaggaagggatcctagaaagacattaatttaacccttcatttaataaatgaaggaaataaatgagggaaagggcatcraacactatgtttgtatgcttaactattccaaaaagcatttgagccttgttgctcattggcggtggtttagacaatgcattattgatatcactgaaccagc

SEQ ID NO: 50439 - DNA, 201 bp, Homo sapiens
gtacaggttccatcagatgtggtatcccaaaaacaggagctgctgtgcgaaagccatatgcgctcttctggaccactgcacatttcacaatacatttatargcttttcccagcttaggcagatgtgttaacgataattccactatgcttgcggtccactggttgatgttgttgtaattataatcttcaccacctaaaaccc

SEQ ID NO: 50440 - DNA, 201 bp, Homo sapiens
attttcaccatatactaccaaacaacttttcaaatatttgtgatttgtcttctccagcaacaaatagaacccattctacacactgttcttcctgctggcawccaacgtgccctactcataataggtgtttaatatgtgctccttgactatgactacagttggaccacaaggtggtgatttgtccataatctcaggttgaag

SEQ ID NO: 50441 - DNA, 201 bp, Homo sapiens
gttgaactcctttattttgttaatattattattaaacatttaacaggtattaattattgttatttggcaaaatatccaacatgcacatggtattcctacawgaatcttgccttaatattgttaatattaacactaagtttattcctctccaaaattcaatgagttatgattccactctctgtaagtgttagtgttagtggt

SEQ ID NO: 50442 - DNA, 201 bp, Homo sapiens
gcttaagttgctagagtgaatctctaaacctcgaaggcaaaccgagccagatcacaacaaaaattgttccaaagttttgtgagagcacacatattttcacmatatactaccaaacaacttttcaaatatttgtgatttgtcttctccagcaacaaatagaacccattctacacactgttcttcctgctggcaaccaacgtg

SEQ ID NO: 50443 - DNA, 201 bp, Homo sapiens
tatgctgtcagtaaatatccctttgcttaagttgctagagtgaatctctaaacctcgaaggcaaaccgagccagatcacaacaaaaattgttccaaagttytgtgagagcacacatattttcaccatatactaccaaacaacttttcaaatatttgtgatttgtcttctccagcaacaaatagaacccattctacacactg

SEQ ID NO: 50444 - DNA, 201 bp, Homo sapiens
acacggtcataagaatgagccatggggaatatgacaaacagcctggtgtggccaaagggtggtggtggcagtggcagaagagaagcagcctgagagatggytagggccagaacaagagccataggatctctcctagtacaggtgggcttcaactatccgcgtttttacatgttgctttggcaaacttgagagaattgatga

SEQ ID NO: 50445 - DNA, 201 bp, Homo sapiens
tactaaattttagcacactgttacttcctctgtacttgactacttttcaattttaattgatagaggtggggtttttatgctttgctttcagccaccctccyccacagtctacattttatgactcagcttaaaaggaatggttctcaccacatagaaatggggtgattttggccccaggggacacttggcaatgttgggaga

SEQ ID NO: 50446 - DNA, 201 bp, Homo sapiens
cattactgatgacaggaggttgggaaaggtcaagggcatgctaaatgtcatccagctactaagcagccaaactgggatctgagcccagtcactttgacccctcacggtgggctctcaggtatctcagtgactccccctggagaaggtgaggcttgggtaggggagggagtttcagtaaacattcccctggggattctgaaa

SEQ ID NO: 50447 - DNA, 201 bp, Homo sapiens
aaaatgtggaattttttccattgaaattattagaccccctgaattctatccaaatgggccccaaaataagagatttttttctctttcctcaccagtaaaayggagctaatgtttttcctccgcaggctgctgggagactttagcaacacacaagtctacagcaggcacacagtaggcacttaataaatgtaacattgcctc

SEQ ID NO: 50448 - DNA, 201 bp, Homo sapiens
gcagtggcgtgatcacagctcactgcagccttgaacttctggtctcaataatcctcctgcctcagacttccaagtagctagggccacaggcatgcgccacyacaccctgctaattttttttattttttgtagagacaaagcctcactatgttgtccaagctggtctcaaactcctgggttcaagtgatccttctgccctgg

SEQ ID NO: 50449 - DNA, 201 bp, Homo sapiens
ttggcataatatcacattccctcttcatgtttgggtcaactgtattttttgtttgtttgtttgtttttttgagacagggcctcactttgtcacccaggctrgagtgcagtggcgtgatcacagctcactgcagccttgaacttctggtctcaataatcctcctgcctcagacttccaagtagctagggccacaggcatgcg

SEQ ID NO: 50450 - DNA, 201 bp, Homo sapiens
ttaggaggtcagtttttaataaaatagagtaatttagaatacagtaggagagaagaaaatcacaggataggataggatagaatagaatagaatagaatagratagaatagaatagaatagaatagaatagaatagaataatcatgcataataaggataagtattgtttcctgaaatatttgtttcagatgtgtgtgtgcac

SEQ ID NO: 50451 - DNA, 201 bp, Homo sapiens; identical to SEQ ID NO: 8747

SEQ ID NO: 50452 - DNA, 201 bp, Homo sapiens
acactaatttccaaaaacaataacatttacaagaagactagtttattcactgaacaaatgtgccaaggaccatcctggacactaaggatataaatatgctraatataatttctctacccttgaagaactggtaccctccttttcaaaaatggaacacacccacatgccagttcccagatgaagggacagcaagaccagcac

SEQ ID NO: 50453 - DNA, 201 bp, Homo sapiens
acagggtttcaccatgttggccaggctggtctcgaactcccgaccccaggtgattcacccacctcagcctcccaaagtgctgggattacaggcatgaaccwccgcgcccggccacacttttgctatttcttgataccgagcccaaatctgagtctgtttgagagtgtgatcctccacaccaactgtagggatgatctattt

SEQ ID NO: 50454 - DNA, 201 bp, Homo sapiens
ctttttttttttttttttttcctttcacccaggctggagtgcagtggtgtgattatagctcactgcagactccagctcctcaaactcctgggctcctcccragtagctaagactataggtgtgcctcaccacgccaagctaattttttcttttgtacagatgggggtgagtgggcctctcgctactttgcccaggctggtc

SEQ ID NO: 50455 - DNA, 201 bp, Homo sapiens
agtttagtagtctccctggcctttatggactagatgctagtaaaacacacatggttgtgatcaccaaaaatgtctccatcactgcatcctggagaaaaagwccacactagttgagaaccagggtggttaagtacactccatagtacctaggttaaaagtttccatttggtaaaaacttttgagaaacactgtaatcccact

SEQ ID NO: 50456 - DNA, 201 bp, Homo sapiens
gggacctatggctacatatagtgggccatgtctaataagaaggtagttttgttccagaattctttaggtagggaaatgctctaacatctgttagctctacytaagacaaatagaagattctccattaattccccaagtcaggaagtgataatgaggtacacctagtgcctgggtgtttaagatcaaaatgatagctgagta

SEQ ID NO: 50457 - DNA, 201 bp, Homo sapiens
catggaatatgtctttcagtctccctccatctctcccttgcaccctctatcacaaatgcacaccactcactctcaaataagacctttagcctgggcaatcrgtggcctgtgttctagtttccccttctcagcctcgctgtcattttccctcccttagtcttagtcgctaaggccttccccatgagcgtggggctcctggga

SEQ ID NO: 50458 - DNA, 201 bp, Homo sapiens
gttgaagattcataacacaagaagcattccccagggcctcctgggaagcaacacctatttcttgacacaaggcagtttaaacacttacttgcaatgatacmcaataaaataaagatacaagccaccccgacaaccccaagtttgtcttttataagactggaacactacgattttgcatgttatctctaataggtcaaagaa

SEQ ID NO: 50459 - DNA, 201 bp, Homo sapiens
aatggacaagcatgtgccctgggattcccatcctcccatgggccagcagcctgccatagatgggctgcctaccataggtaagcatcctcccacgggccagygtcctcccgtagatgggcagcccaccataggtcagcatcctcccacaggccagcatcctgccatatacgggcagcccaccataggtcagcatcctcccat

SEQ ID NO: 50460 - DNA, 201 bp, Homo sapiens
catagaagtttagtagtctccctggcctttatggactagatgctagtaaaacacacatggttgtgatcaccaaaaatgtctccatcactgcatcctggagmaaaagtccacactagttgagaaccagggtggttaagtacactccatagtacctaggttaaaagtttccatttggtaaaaacttttgagaaacactgtaat

SEQ ID NO: 50461 - DNA, 201 bp, Homo sapiens
gtcctccaatggacaagcatgtgccctgggattcccatcctcccatgggccagcagcctgccatagatgggctgcctaccataggtaagcatcctcccacrggccagtgtcctcccgtagatgggcagcccaccataggtcagcatcctcccacaggccagcatcctgccatatacgggcagcccaccataggtcagcatc

SEQ ID NO: 50462 - DNA, 201 bp, Homo sapiens
gcccagcaagttccaactcactgctctcactgagcagggtttctcagcctgggcatatggacattctgggcaaaatactgttttgtcggtggtgaggaggytgtcctttgcatagaagtttagtagtctccctggcctttatggactagatgctagtaaaacacacatggttgtgatcaccaaaaatgtctccatcactgc

SEQ ID NO: 50463 - DNA, 201 bp, Homo sapiens
tctcagcctaaaatgtcctccaatggacaagcatgtgccctgggattcccatcctcccatgggccagcagcctgccatagatgggctgcctaccataggtragcatcctcccacgggccagtgtcctcccgtagatgggcagcccaccataggtcagcatcctcccacaggccagcatcctgccatatacgggcagcccac

SEQ ID NO: 50464 - DNA, 201 bp, Homo sapiens
gaatgtttcagaaattttgggcttgtgagaggctacttaaggccatgcccagcaagttccaactcactgctctcactgagcagggtttctcagcctgggcmtatggacattctgggcaaaatactgttttgtcggtggtgaggaggttgtcctttgcatagaagtttagtagtctccctggcctttatggactagatgcta

SEQ ID NO: 50465 - DNA, 201 bp, Homo sapiens
caaatcagatatcctctcagcctaaaatgtcctccaatggacaagcatgtgccctgggattcccatcctcccatgggccagcagcctgccatagatgggcwgcctaccataggtaagcatcctcccacgggccagtgtcctcccgtagatgggcagcccaccataggtcagcatcctcccacaggccagcatcctgccata

SEQ ID NO: 50466 - DNA, 201 bp, Homo sapiens
agcaatttgtaacattctttttatattatgagcaaaataaaaaaattgcttgaatgtttcagaaattttgggcttgtgagaggctacttaaggccatgccyagcaagttccaactcactgctctcactgagcagggtttctcagcctgggcatatggacattctgggcaaaatactgttttgtcggtggtgaggaggttgt

SEQ ID NO: 50467 - DNA, 201 bp, Homo sapiens
cctccctcagcatcctgagctcccccatcatgacagccctcacattttcaatactgagttgtccctctgtccccctaggctatcagctggtggggacaggracatccgtctgacatgcccagagttagcacgatgcctgaatgtggtagacactcaacagacatccatacaatcacttcattgcgcagtaccttctcatat

SEQ ID NO: 50468 - DNA, 201 bp, Homo sapiens
atcttgaagctgggaggcaaagactgcaataagtcgagatcacaccattgcactccagcctgggtgacagagctatactctgtctcaaaaaaaaaaaaaaatctatgaaagaaaaaaacataggcaaagcatattatcttttggggcttggggctttgctaaataataaagcaagaatacaaatgagcaggaaagacacaa

SEQ ID NO: 50469 - DNA, 201 bp, Homo sapiens
tgggaggctgttgtgggcagatcccttgaggtcaggagtttgggaccagcctggccaacatggtgaaactccgtcatctctactaaaaaaaataaataaakaaaaataaaaattggctgggcacagtgctatgtgcctgtaatcccagctacttgggaggctgaggcaggagaatatcttgaagctgggaggcaaagactg

SEQ ID NO: 50470 - DNA, 201 bp, Homo sapiens
ctccctgcaagtaacagccacccttgccttcatgagtctggaagttccctttgcgaagtggaaaagctggaggaaaaacacctgaaaccccaaggttttatgtttccccaaaatgacaagtttcccaaccagagtcctaagttaccccaagactgtggaggacaacttttctaagtcaaggaaagatctcacactttaagg

SEQ ID NO: 50471 - DNA, 201 bp, Homo sapiens
tctccctgcaagtaacagccacccttgccttcatgagtctggaagttccctttgcgaagtggaaaagctggaggaaaaacacctgaaaccccaaggttttatgtttccccaaaatgacaagtttcccaaccagagtcctaagttaccccaagactgtggaggacaacttttctaagtcaaggaaagatctcacactttaag

SEQ ID NO: 50472 - DNA, 201 bp, Homo sapiens
gagcatatcaaacatctttgaaccttaattttttcatccgtgaaatgggcaaaatggatgtcttgtcaggtttgttgcaaggtatccttgagataatatgygtatcaggcctggcacataatagatgctcaataagcattcatttccttctgtctcagaagagttgaggttacaacgttgcacaatttcgggttgtcctga

SEQ ID NO: 50473 - DNA, 201 bp, Homo sapiens
aggaggaagagagaataagtcagtgaccttttagtaataatgtgaaaatatagtttagacactcggaaatatttctctgacattaagggctttatcatacrtggaattgtaacactgcagtctttcccagaggtcttctaaaatagtttataacccaatctgtccggtcatggtaattttatttataatggaaaacaatct

SEQ ID NO: 50474 - DNA, 201 bp, Homo sapiens
tgcctttttttttttaacttgctcactttcctatctccttatgtctaatttttcccctacattgtctaatagtttcctaaattttttcagtatggtcaaaygcatcccctaaacgatccattgctttatttggttgtcatccaccctagagataccatcctttgacttcacgatgtagtggttgctttctggaccagctca

SEQ ID NO: 50475 - DNA, 201 bp, Homo sapiens
ccatttcctacttgacttggaaggagaaagaaatgttaggaagagtgaaaaatgaatggggaaaaagaacacatcagttcttctccacatggtctctcatyctccagcagcctaccccagacctaaattcaaatgagcttccctttctctcccatccctactcctgggcatcatgttctgcctataagagattgcatgcaa

SEQ ID NO: 50476 - DNA, 201 bp, Homo sapiens
ttcaattgctcattagccacatgtagccagtggctaccatactagagattatatatatagaatatttccatcatcgtagagtgtcctattggccaatgctrgtctagacatttgtaaatatactatgtatatgagtatacatgtatatacacatatagacacgttatatatatgtgcatatataatgtatatgtaggataa

SEQ ID NO: 50477 - DNA, 201 bp, Homo sapiens
cttgaacccaggaggcagacgttgcagtgagctgagttcatgccattgcactccagtctgggcatcaggagtgaaactctatctcaaaaaaaaaaaaaaaaatgcaccaagagggatcagggcaatgagatagattcaggcaagacctcatagtgcctgggaccagacagacatcctgatccaaggtggctgcaggatgcc

SEQ ID NO: 50478 - DNA, 201 bp, Homo sapiens
taaagatacaaaaaattagccaggtgtggtggtgggcacctgtaatctcagttactcaagaggctgaggcaggagaatcacttgaacccaggaggcagacrttgcagtgagctgagttcatgccattgcactccagtctgggcatcaggagtgaaactctatctcaaaaaaaaaaaaaaaaatgcaccaagagggatcagg

SEQ ID NO: 50479 - DNA, 201 bp, Homo sapiens
ctctactaaagatacaaaaaattagccaggtgtggtggtgggcacctgtaatctcagttactcaagaggctgaggcaggagaatcacttgaacccaggagrcagacgttgcagtgagctgagttcatgccattgcactccagtctgggcatcaggagtgaaactctatctcaaaaaaaaaaaaaaaaatgcaccaagaggg

SEQ ID NO: 50480 - DNA, 201 bp, Homo sapiens
cccgtctctactaaagatacaaaaaattagccaggtgtggtggtgggcacctgtaatctcagttactcaagaggctgaggcaggagaatcacttgaacccrggaggcagacgttgcagtgagctgagttcatgccattgcactccagtctgggcatcaggagtgaaactctatctcaaaaaaaaaaaaaaaaatgcaccaa

SEQ ID NO: 50481 - DNA, 201 bp, Homo sapiens
tgcaccaggaggggcttggcatagtggctcacgcctgtaatcccaacactttggggggctaaggcgggtggatcacctgaggtcaggagttcaagaccagsctgatcaaaatggtgaaaccccgtctctactaaagatacaaaaaattagccaggtgtggtggtgggcacctgtaatctcagttactcaagaggctgaggc

SEQ ID NO: 50482 - DNA, 201 bp, Homo sapiens
gcagggaggcctgtgatggataaggagagagggcagaaaagcctcagacgcgatgcctacctggctcctgcaaacgacagtgggaaggaaggggccggggsgggagggtctcagacagcagtccccacgccaaagctgcccatcacagacagaaaggggcctgcactggcacccccaccacccactcagtcgttggctggc

SEQ ID NO: 50483 - DNA, 201 bp, Homo sapiens
aaagatttatgttgtttcttggcgcggagggggttgttttttgttttttgagacagagtctcactctgtcgcccaggctggagtgcagtggctccgtctcrgctcactgtgacctccgcctctctggttcatgcgattctcctgcctcagcctcctgagtagctgagattacaggcacgcgccaccacgcctggctaattt

SEQ ID NO: 50484 - DNA, 201 bp, Homo sapiens
tttttcctttcacccaggctggagtgcagtggtgtgattatagctcactgcagactccagctcctcaaactcctgggctcctcccgagtagctaagactayaggtgtgcctcaccacgccaagctaattttttcttttgtacagatgggggtgagtgggcctctcgctactttgcccaggctggtctcaaactcttggcct

SEQ ID NO: 50485 - DNA, 201 bp, Homo sapiens
tccccatcaagctaccaatgactttcttcacagaattggaaaaaaactactttaaagttcatattgaaccaaaaaagagcccgcattgccaaaacaatccyatgccaaaagaacaaagctggaggcatcacgctacctgacttcaaaccataatacaaggctacagtaaccaaaacagcatggcactggtaccaaaacaga

SEQ ID NO: 50486 - DNA, 201 bp, Homo sapiens
aacagcccttcatgctaaaaactctcaataaactagatattgatgaaatgtatctcaaaataataagagctatttatgacaaaaccacagccaatatcatrctgaatgggcaaaaactggaagcattccctttgaaaaccagcacaagacgaggatgccctctgtcaccactcctattcaacatagtgttggaagttctgg

SEQ ID NO: 50487 - DNA, 201 bp, Homo sapiens
agaagaaatggataaattcctgaacacaaacaccctcccaagactaaaccaggaagaagttgaatctctgaatagaccaataacaggctctgaaattgagrcaataattaatagcctaccaaccaaaaaaagtccaggaccagacggattcacagccaaattctaccagaggtacaaagaggagcggttaccgttccttgt

SEQ ID NO: 50488 - DNA, 201 bp, Homo sapiens
aactccaaaagactggcagaattcaaagtggagttgcaccactcacttaatttcacctaaatgcacttgcctttttttttttttttttttcctttcacccrggctggagtgcagtggtgtgattatagctcactgcagactccagctcctcaaactcctgggctcctcccgagtagctaagactataggtgtgcctcacca

SEQ ID NO: 50489 - DNA, 201 bp, Homo sapiens
ctggagcttctttctccaaagccaagggtgaaaagactgcagctggccaccatgggtcttctgttgtctaagaatctgtagatgcagagagactggagacmagaagacaaagacagcctcatgtgcatgaacttagccaagttgcacactggcttgctgactaatctgtcttatctccttatctctgtgaatgcagatccc

SEQ ID NO: 50490 - DNA, 201 bp, Homo sapiens
ggagtaggacttttccaactgagcaaaccctgggacagatcaaataacaacaaatcctataaatggaacttttccagatagcttccaggcaattatttagrgatggagctttttaaataactctaaacccagtctgcaccctctactatgtatttggctactggttttcacagctgctgtgattgtgaggttgttcatgtt

SEQ ID NO: 50491 - DNA, 201 bp, Homo sapiens
tttgccagggactttcctgtttttagcattgaaaagtcctacatctcaggaaacccctcaatcctgggcaaaccaagacagttggtcacccaccctttggygctattagtagcgttggcccacctgggcccagtgagaaattcacccgaggttagaagttgacatgaatgtaaactcagcagcacctctgacatcagaaag

SEQ ID NO: 50492 - DNA, 201 bp, Homo sapiens
gcatcatccttagcttggcttttccagagaacctgataccctactcccgctgaactaccacagaacccacagggactctgcagagtctggaactgaccagwgaaagttccaaactacaaaggataccatctatcatcactcccactcacaactcattgattaaaatggcttataagacctcacccaaccacaaagaggcct

SEQ ID NO: 50493 - DNA, 201 bp, Homo sapiens
gccaacatggtgaaactccgtcatctctactaaaaaaaataaataaagaaaaataaaaattggctgggcacagtgctatgtgcctgtaatcccagctactygggaggctgaggcaggagaatatcttgaagctgggaggcaaagactgcaataagtcgagatcacaccattgcactccagcctgggtgacagagctatact

SEQ ID NO: 50494 - DNA, 201 bp, Homo sapiens
ccaacatggtgaaactccgtcatctctactaaaaaaaataaataaagaaaaataaaaattggctgggcacagtgctatgtgcctgtaatcccagctacttrggaggctgaggcaggagaatatcttgaagctgggaggcaaagactgcaataagtcgagatcacaccattgcactccagcctgggtgacagagctatactc

SEQ ID NO: 50495 - DNA, 201 bp, Homo sapiens
accacacaactacatggaaactgaacaacctgctcctgaatgactactgggtacataacgaaatgaaggcagaaataaagacattctttgaaaccaatgasaacaaagacaaaacataccagaatctctgggacacatttaaagcaatgtgtagagggaaatttatagcactaaatgcccacaagagaaagcaggaaagat

SEQ ID NO: 50496 - DNA, 201 bp, Homo sapiens
ttggggctttgctaaataataaagcaagaatacaaatgagcaggaaagacacaaaaagataaattcaactttagtgaaaaaatatataactcaaaacaatraggtactatttttacccaccaaattggcaaaactatttttaagaaatgacaattctaaattatgacgcatatgagctgaatatagagttctcatgcactg

SEQ ID NO: 50497 - DNA, 201 bp, Homo sapiens
ctcccagcccacaggtgaacactaagcagccccaagccccattgccttggggtaagaaagtgggaagcaagaaactaatggtccaatcctgggttgtttargtagagaggaaaatcctcagaagacaaggaaaaggatttttaagaacctctaagaacatggtttgaggagaagagccatgctaactgtagggacttatgc

SEQ ID NO: 50498 - DNA, 201 bp, Homo sapiens
tttaaacataaagcacttttttaaaaactagagacagcattccatgtacattcaagaagaggtgtaaataaattgcggaatggctatttcataaaactaawaaaaaattatggtgtagaagagtatttaatcacataaaaaaagtcaattatataaattgtgagaaatacattttaagcaggccaagaaagttgatctatt

SEQ ID NO: 50499 - DNA, 201 bp, Homo sapiens
aagcttcaatagccgatttgatcaagtggaagaaagggtaacagtgattgaagatcaaattaatgaaataaagtgagaagacaaggttagagaaaaaagartaaaaagaaatgaaaaaaccctccaagaaatatgggactatgtgaaaagatcaaatctacgtttgattagtgtacttgaaactgacagggagaatggaac

SEQ ID NO: 50500 - DNA, 201 bp, Homo sapiens
gctaaccagaataaacagtgtagagaagactttaaatgacctgatggagctgaaaaccatggcacgagaacttcgtgacgcatgcaaaagcttcaatagcygatttgatcaagtggaagaaagggtaacagtgattgaagatcaaattaatgaaataaagtgagaagacaaggttagagaaaaaagagtaaaaagaaatga

SEQ ID NO: 50501 - DNA, 201 bp, Homo sapiens
ataaattgtgagaaatacattttaagcaggccaagaaagttgatctatttttattatcccaatttcactttcaagcccgttcttatactttgcatttatakgtaaaattggcaagaatccacaaaatatcaccagtgattatctattcatgtaagattataaaggacttttatttccttcatcttctatattccaattatt

SEQ ID NO: 50502 - DNA, 201 bp, Homo sapiens
tggtggtgcatgcctgtaatcccagcaacttgggaggctgaagcagcagaatcacttgaacccaggagacagaggttgcagtgagccaagaccgcaccacygtactccagcctggaaggcagagcgggactgtctcaaaaataaataaataaaataaaagattgcagggtttaaattgaatctcttcctacccttactgca

SEQ ID NO: 50503 - DNA, 201 bp, Homo sapiens
tgacagaagtaggcttcagaagctcagtaataacaaacttgtccaagctaaaggagcatattctaacccattgcaaggaagctaaaaaccttgaaaaaagsttagatgaatggctaaccagaataaacagtgtagagaagactttaaatgacctgatggagctgaaaaccatggcacgagaacttcgtgacgcatgcaaaa

SEQ ID NO: 50504 - DNA, 201 bp, Homo sapiens
actttcccccacattctattggccaaagcaagacataaagccagcttggagtctaggggtaggaaatagaccactcttcttgatggatggggctgcaaagkcatagtgcacagggcataaatacagggaatcatgaataattagggtcacaatcaatctaccacactccccacacaaagaagagaatgtttagcatcgatt

SEQ ID NO: 50505 - DNA, 201 bp, Homo sapiens
atatatatacataatatataaatatatattataaccatatatagctattacatagctatatatggttctggaatgagacctctcaattcatgattatccarctgggagtcttttgggaaagttacttcacctctgtaagcctcaggtttttcatctacaaaatggagataataagcataacaatttcttaaggtggttttg

SEQ ID NO: 50506 - DNA, 201 bp, Homo sapiens
cccatggagctttgctcactgctagtgcagcagtctgagattgatctgcaaggcagcagcctgatggagggaggctgagacttgagtaggtaaaaaaaagyggccaggaagctcagactgggcagagcccaccacagctcagcaaggtctactgcctctatagactccacctctgtgggcagggcatagctggaaaaaagg

SEQ ID NO: 50507 - DNA, 201 bp, Homo sapiens
gtatgtctcagagcagagagatctgcctagaaagacaaagactgagtgagaagctatagtgtgggctatcagagggcagcctgggagcccaagaggcctcrgacattggtcagggattggcaaactctttccgataaaaggccactttgtaaatactttaggctttgtggggttttgtcacaacgacttatctctgctgtt

SEQ ID NO: 50508 - DNA, 201 bp, Homo sapiens
gtgttatttgtcttatagagagtatgatttttttttaaatcctatttctataaggaacaacataatcaacagagaacaaagaaacaggttgaaccctgccrttgaaatcaggagaattaaccttctcattggaggcatatttgctggtttaggcctcaaaggcattacatcaaccttggatgagacaatttactaaataaa

SEQ ID NO: 50509 - DNA, 201 bp, Homo sapiens
tttttccatttgattttttggaaaatatatgcagttcccaaatttgaacaataaatgtgcatttataatgtaagattatgctcccagaaagctaaaaaaaagttagaattatcataattacataatccctattatacttcaactcttagacataatttttaatcatttatcttcaaaaagatgaatatttttaaatttttt

SEQ ID NO: 50510 - DNA, 201 bp, Homo sapiens
gaaccaccgcgcccggccacacttttgctatttcttgataccgagcccaaatctgagtctgtttgagagtgtgatcctccacaccaactgtagggatgatmtatttccctcgctgtcctggtttctgagagcagttccttgttttggttggagttttccagcatagatttaccaagatgctgagaatagttcccagctagt

SEQ ID NO: 50511 - DNA, 201 bp, Homo sapiens
tggttatatatttttaatatataatataatatatattatattaaatataatatatattatatataatatatattatatttaatataatatatattatatawaatataatatatattatattatatataatatgatataatatatattatataatatattaaaaatatatactttttttttgagatggagtctcactctgtc

SEQ ID NO: 50512 - DNA, 201 bp, Homo sapiens
aagatgctgagaatagttcccagctagtggttgaataaatatttgttcacttgtcgattcaatcaatcacaggctgattaattcccagtgctgttagaagygattgaaaatgtcacatctgattgtcaggcggcagagagcacttggaggtaatccagtcatctctcttccttctggcttctccactcttaaaccactgat

SEQ ID NO: 50513 - DNA, 201 bp, Homo sapiens
agggagcattgccattttaaaaaatccgtgaacatgagatgcttttccatttatttagatctttaatttctttcagtgatgctttgtacttttcagtgtayacatcttgcacttcttttgttaaatttattccccagtattttacttatttgatattattttaaattgacttatattcttaactttatgcttggattgttc

SEQ ID NO: 50514 - DNA, 201 bp, Homo sapiens
aaaaggatttttaagaacctctaagaacatggtttgaggagaagagccatgctaactgtagggacttatgcaaagtttgccatttaaactaattagcatgkggcaataactactgtgcttactactgtgtgtttaaggttttattcactgtgtgttttacttgatcatattagactttcctcctacatttggagttccctt

SEQ ID NO: 50515 - DNA, 201 bp, Homo sapiens
tttctgatgttgatacttatactgcctttttcttagaaaacacacacacaccatctacaacttattctcaaatgattcaccaaagtaatacgtatatgtargaaaataattttttaaatgcagtaaaatgttaacaattggggactctgggtgacatggctatatgagttattttcactattcttgcaacttttccataag

SEQ ID NO: 50516 - DNA, 201 bp, Homo sapiens
acttatgcaaagtttgccatttaaactaattagcatgtggcaataactactgtgcttactactgtgtgtttaaggttttattcactgtgtgttttacttgwtcatattagactttcctcctacatttggagttcccttgctcaagtaaaatgtcatatattatgtgtttaaaaggattctagtatccaattgaataaaaaa

SEQ ID NO: 50517 - DNA, 201 bp, Homo sapiens
tttattgtttgttgctcttttctgagcaaagaaaaaaaaatcttcctttcttggcaactaggtataatggtgaattttccaagcccctgggaaatacatcrtctgtaaagcataataagcttttttggatcttttcctctctggagattttgctcacagatcagccttttcttacacctccaaaccaggatttagtaggtg

SEQ ID NO: 50518 - DNA, 201 bp, Homo sapiens
ccatccagtgtttcgatcccacgctcccacgtgggatcccaacttggcaagatggccatgcccctgcgtgagcgaggagaagccctttacctggaagggaygcagaccttaaaagcctgtccttcccacgagccctcctgcattcccccttggtcttggggaggatgaagaatgtgccagctcctcccaaacagaaggggg

SEQ ID NO: 50519 - DNA, 201 bp, Homo sapiens
cggcctcattccccacagagatcattaagagagacttcataaataaaagactgaattatggatggatggacggatggatggatggatggatggatggatgratggatggatggatgattggatggatggatggttagatggatggatagatggatggatagttggatggaacggatggatgaaaagatgggaggatgctaa

SEQ ID NO: 50520 - DNA, 201 bp, Homo sapiens
gattgcaccactgcactccagcctgggcgacagagggagactctgtcttgaaaaataataaataaataaataaataaataaataaataaataaataaataaaaataaaagattagtaaattaatgaaagtaacaaattcttcatacctgaaaatattcaagaggaagtttgatggccactggtgggatgttattgaagaga

SEQ ID NO: 50521 - DNA, 201 bp, Homo sapiens
agattgcaccactgcactccagcctgggcgacagagggagactctgtcttgaaaaataataaataaataaataaataaataaataaataaataaataaataaaaataaaagattagtaaattaatgaaagtaacaaattcttcatacctgaaaatattcaagaggaagtttgatggccactggtgggatgttattgaagag

SEQ ID NO: 50522 - DNA, 201 bp, Homo sapiens
gagattgcaccactgcactccagcctgggcgacagagggagactctgtcttgaaaaataataaataaataaataaataaataaataaataaataaataaataaaaataaaagattagtaaattaatgaaagtaacaaattcttcatacctgaaaatattcaagaggaagtttgatggccactggtgggatgttattgaaga

SEQ ID NO: 50523 - DNA, 201 bp, Homo sapiens
tgagattgcaccactgcactccagcctgggcgacagagggagactctgtcttgaaaaataataaataaataaataaataaataaataaataaataaataaataaaaataaaagattagtaaattaatgaaagtaacaaattcttcatacctgaaaatattcaagaggaagtttgatggccactggtgggatgttattgaag

SEQ ID NO: 50524 - DNA, 201 bp, Homo sapiens
ctgagattgcaccactgcactccagcctgggcgacagagggagactctgtcttgaaaaataataaataaataaataaataaataaataaataaataaatawataaaaataaaagattagtaaattaatgaaagtaacaaattcttcatacctgaaaatattcaagaggaagtttgatggccactggtgggatgttattgaa

SEQ ID NO: 50525 - DNA, 201 bp, Homo sapiens
agctgagattgcaccactgcactccagcctgggcgacagagggagactctgtcttgaaaaataataaataaataaataaataaataaataaataaataaataaataaaaataaaagattagtaaattaatgaaagtaacaaattcttcatacctgaaaatattcaagaggaagtttgatggccactggtgggatgttattg

SEQ ID NO: 50526 - DNA, 201 bp, Homo sapiens
tagtcccagatactcaggaggctgaggcaggagaatcgcttgaacccaggaggcggaggttgcagtgagctgagattgcaccactgcactccagcctgggygacagagggagactctgtcttgaaaaataataaataaataaataaataaataaataaataaataaataaataaaaataaaagattagtaaattaatgaaa

SEQ ID NO: 50527 - DNA, 201 bp, Homo sapiens
tgtgaaagtcctttaaaaatctgtttaccagtctcccctctaaataagagttgtggaggtgatacccacatattgggttgtcttgactcaacacatctcakaatctctccgtggattttagatgtagagaaacatgttttaatagcctgcccttctagagagactttagctgagcatgttgattctttcctcttcgggaat

SEQ ID NO: 50528 - DNA, 201 bp, Homo sapiens
ctcttctgtgcaaatgggagcccactatccactctattctacatattgccttttttgcttaacaacatttcttgggaatgagttcattgctagtttcatayctcattctttgccagagctgcagagttttgcatcatatgggtgcaccagaatttctttaactcatccccagtgttggagatttaggttgtttctaatatt

SEQ ID NO: 50529 - DNA, 201 bp, Homo sapiens
gattgattaccagctctccgcatgaatatcagaaagtgcagtggcaacatatccactggctacttgctgtctttctgtaactagtaggtactaaattagtmtttgatggattgatgtaagcacaaaaatataaccaatggaaagattatcccccaatctcattttctgaacccaaacaaaatctaccctagtcaaatcttc

SEQ ID NO: 50530 - DNA, 201 bp, Homo sapiens
tttgtgaggtttggtccagtgcagcacactaatccagcactccagggaggactagaaacgtttaaagtctcccagcgctttccctttactgcgcctctggstgtacggacctaatgagatgccttgtgtttttcagaatgccgaagcaagttacgacttcagcagcaacgacccctatccttaccctcggtacacagatga

SEQ ID NO: 50531 - DNA, 201 bp, Homo sapiens
ccagagagggagacggggacctagtgctggttttcatcatctgtccactctggcttctgcagtaacaccattcccattggcctcggtggtcagttcacccrgatcctgcctaaaccctggatgcttattgtcctgaccacccgaatgtcctaggccagctagttctcagcgtcacatcctcaccaacctccgctccctgct

SEQ ID NO: 50532 - DNA, 201 bp, Homo sapiens
atgattgtcaagctgtactcagaaacccaggggccaccaggtagtgttgaagaggctctagaaaaaagaggaagtatttcagattctgaggaattcagtcrtcagtgttatttgtcttatagagagtatgatttttttttaaatcctatttctataaggaacaacataatcaacagagaacaaagaaacaggttgaaccct

SEQ ID NO: 50533 - DNA, 201 bp, Homo sapiens
tagtcacacactttctcttgttttcttttgttttctttggctcattagacctctccttcagaaccaaagaaatccattgtgacaactctgttctcagagcygactttttccatagagagaacttcagtctgagacatgccaaggagttcttgacgctcccaaaattaacacctttcaatctttactattagagattaactt

SEQ ID NO: 50534 - DNA, 201 bp, Homo sapiens
ccctccactctgaacttttactcttctttcttgcagaatcaatccctccagcagccctcaactaccagaagcacaaaaattcaatatatttttttttttgrgatggagtctcactctgtcgcccaggctggagtgcagtggcatgatctcggctcactgcaacctccacctcctaggttcaagcaattctctgcttcagcc

SEQ ID NO: 50535 - DNA, 201 bp, Homo sapiens
gacatagtttctaccctcaaggaccttagcaactagagggtaaaatagactccaaagaaataactacagaaataattatgatctaggtgctttgctacagyggaagagtactcggtgatataaatgtgtttaatatggagaaccagatctgggctgccagttaagggaagatttccctagagtagctatccctatgctgat

SEQ ID NO: 50536 - DNA, 201 bp, Homo sapiens
agttattgagagctatgctacaccagaaactgtagtatattagttacctattgctgcatctcagattacccccaaaacatggcagcataaaacaaaatacrtatatatattttgtttcacaccgtttttatgagtcagaaatttaagagcagtttggctgggtggctccgtgtttctcgtgaggttgcagtcagcatgttg

SEQ ID NO: 50537 - DNA, 201 bp, Homo sapiens
gctaggcaaccagggctcccagcatcaatctctaggcagccctgcttgtctctctccacataggcagtgcattttctgatttgcaaaggaggcaggagttsgttcctagaatagaaaggggcttcaacagattacctagttcaaccctctaccttcacaagaaaaggcataattatcctccctttacagataagaccccaa

SEQ ID NO: 50538 - DNA, 201 bp, Homo sapiens
tgcaaaggaggcaggagttggttcctagaatagaaaggggcttcaacagattacctagttcaaccctctaccttcacaagaaaaggcataattatcctccytttacagataagaccccaaattgagagtgacttctctttttggacaagtctaaactttgactcttctaacaaaattcagatagaaaatttatgatgccaa

SEQ ID NO: 50539 - DNA, 201 bp, Homo sapiens
ttggttcctagaatagaaaggggcttcaacagattacctagttcaaccctctaccttcacaagaaaaggcataattatcctccctttacagataagacccyaaattgagagtgacttctctttttggacaagtctaaactttgactcttctaacaaaattcagatagaaaatttatgatgccaagacactggtcaaagctc

SEQ ID NO: 50540 - DNA, 201 bp, Homo sapiens
ttcatctcagggtctgagtgggccctggagcctgagctggccttgctcactgcatccgcaaggagacaattagcacagcctgctgcctgtagctgagctgygcagagccagggaacaggagtgctccaaaagcgagaagggtttccggttgccctttcaacctcagaagtcaggacttgactcacagtcttctggattttt

SEQ ID NO: 50541 - DNA, 201 bp, Homo sapiens
catagaatacaaatccctagggatgggtggcccaggaacctgacttttcaatgcctgttccccgggaatacttaagctgccagcctgtcgctgatctgtgractagggtgtgaggatgatcaataaggcaatagctctgtgaatctatgactctgggtgcagagtgtgggtagctggcttctgcctctgattaggtgttgg

SEQ ID NO: 50542 - DNA, 201 bp, Homo sapiens
tcatgcattgcatacctgtatccaaatatctcatgtaccccataaatacatacacctactgtgtacccacaaaaattaaaaattaaacattaaacaaaaartcagtctgctggtcagccacttcctaagagatgcttgctgacccctggacccaagtttctcagatttcctgatgatcagaatcctggagtgcttgttaaa

SEQ ID NO: 50543 - DNA, 201 bp, Homo sapiens
ctgtccaatacaatagcttgtggctattgagtgctagaaagtggatgaccgtgattaagaaacaagagttttcattttatttcattctcattaatttaaayttaaatagcaacatgtggctggtggctaccatcttggacagccatgtctaaggcacatctggtagttacatcttagcaggagggatgctgaattgtgcaa

SEQ ID NO: 50544 - DNA, 201 bp, Homo sapiens
aagaagatgagactgcaagaaaggcttgctggtccattttatagcctcatgccttcccccagcacgacatccaattgcagcatcctagaagcctaaaggcrgccttgggagggtgctagtaagaactgctgctaagaacttctctcggaaagtcactgggatagcactttattccactatctcatttaatcacaggaggtt

SEQ ID NO: 50545 - DNA, 201 bp, Homo sapiens
gctgttgaaattcaacccatctgaaacagcaacaggagcctgacatttgagtgacacaatgcggtttacagagaatgtctgccaacaggatcgggtggcargaaagtgacgtccctaccctgtttcaatgcctggtctccttaagaagcatttaggatgaaatttttgatgcacagacagcctgtttccttattgcattat

SEQ ID NO: 50546 - DNA, 201 bp, Homo sapiens
gacatccaattgcagcatcctagaagcctaaaggcggccttgggagggtgctagtaagaactgctgctaagaacttctctcggaaagtcactgggatagcrctttattccactatctcatttaatcacaggaggttggcatccctagtcttaatttaggtgagaaaacaggatcagacaaataaagcaaacggccttaact

SEQ ID NO: 50547 - DNA, 201 bp, Homo sapiens
tacataatctcatggagactcagttttcttacctgtagaatgggggttataatatttaattctcaaaactgctgtggggctcacacaaaattaatttgtgytgaattacacatatttgtaatttatacataaaacttatatgtatatgtataatagcaacagacccctgatacagtatttattattcatatacctgtcctt

SEQ ID NO: 50548 - DNA, 201 bp, Homo sapiens
atttactgtgtgtttggccttgtgttttatatgcatgatcacatttaatgagcgtgttaagccagtgaagtgggtactttcttacccacctgtcatagackggaaactgaagatcagagaggctagtgatttgccttagctcacacagacagtgagtagcaaaatgtgaagttcaccatctgtcatgctgccttcatttaa

SEQ ID NO: 50549 - DNA, 201 bp, Homo sapiens
cacagccaaacggcatcagcacctcttctgttgtgggttcaattgtgtccccaaatattcatatgttggggtcctaatccccaatacctcataatgtgacyttatttggaaatagggtcattgcagatataattaattaagatgatgtcatattggagtaggatgggcccctaatccaatatgattggtgtccttatttaa

SEQ ID NO: 50550 - DNA, 201 bp, Homo sapiens
agacaaggctacaaaaattctctaaggtacagatgagacagcgcattgattgtttactccctaaggggctgcaaagggcaaagcacagaactcaggtcttyttccagctggaatgtatggacagggaccacttacaagaaaaccaccatccaggaaagcaggggacagagagctgcctggggagacagtgattaatcaggc

SEQ ID NO: 50551 - DNA, 201 bp, Homo sapiens
aacagggtctcactgtgttgcccaagctaggatgatacagttgcacaatcatagcttgctgcagcctcaactcccaggttcaagagatcctcccgcctcarcctcctgagtagctgggactacaggtgcgtaccaccatgcctggttaatattttttatactttttgtagacatggagtcttgccatgttgcccaggctga

SEQ ID NO: 50552 - DNA, 201 bp, Homo sapiens
taaagacaaggctacaaaaattctctaaggtacagatgagacagcgcattgattgtttactccctaaggggctgcaaagggcaaagcacagaactcaggtyttcttccagctggaatgtatggacagggaccacttacaagaaaaccaccatccaggaaagcaggggacagagagctgcctggggagacagtgattaatca

SEQ ID NO: 50553 - DNA, 201 bp, Homo sapiens
aaaagtttataggacttttcctttatcctataaattcagaaatttcactagatgtgatttattttcagtaatcttgtctgtcattcagtgagagttaacartctgaacactaaaacttttctgcaaatcaaaaatatgtttgcctgttttcctccatctcctctgttctcttcttctcaaactcttattacataggtgtaa

SEQ ID NO: 50554 - DNA, 201 bp, Homo sapiens
taccctcccccagctcaccctgaaagagcagcctgactgggaatctggggatggggtgtttttcctttctgtcccagaacgccctgtcttcctcatgcaargtgatgagctctcacccaagggctggctctgcaggctggatcacacagctgtacatgcccttccccacttcccattctaaatccacctgatcaagctgga

SEQ ID NO: 50555 - DNA, 201 bp, Homo sapiens
gtggcctcaaaggacatttgaagaaaaattgttacttaccagaccccaccagagctgctgagatgatcccatgtaaccctaactacagagttacctttagyttttttcagttaaattgtattttatgtgagttttaattgacacaaaatataattttgaaagcctgcaaaaaaatgcataaatgtaaggcagaaatggcca

SEQ ID NO: 50556 - DNA, 201 bp, Homo sapiens
agggataacaagcttgatgcctacacaggccatgcaaataaattacaaattgaggtgggtcagttgtaagcaaaacagctactcaagcaagagaataaacrgcaaaatgatcttctcctctgtgtgaggaacacaacagagagtggtggggactgtggtgaacctgagtgtacacaccctcttaaaaggaggaagcggatt

SEQ ID NO: 50557 - DNA, 201 bp, Homo sapiens
caaatttgcttaactgaaaaataattgcttttctacatcatgctgcctccaggaagccttccctgactgccaagaactcttcccttgagacacaattttaragctctgctattttcccttttctttttacttttattatatttatcatttattttctattaacacatgaacatgtcattagctaatgggtacgtgtattta

SEQ ID NO: 50558 - DNA, 201 bp, Homo sapiens
cctctctttgaattgtaaactaatcagctagtacttgagtttttccattagtctcttgtgcatttagttgaaccctttccttggcttcaaaaaaccctgawcaaatttggtttaagatgtataagggacctggaatcaaagtctgagaacctagggtaaattctccaagccaaggtcctggctccatgtttctcttagaac

SEQ ID NO: 50559 - DNA, 201 bp, Homo sapiens
aaactccgtctttactaaaaatataaataattacccgggcacagtggagggcgcctgtagtcccagctactcgagaggctgaggcaggaatggcgtgaacscgggaggcggagcttgcagtgagccgagatggcgccactgcactccagcctgggcgacagagcaagactccgtctcaaaaaaaaaaaaaaaaaaaaaaga

SEQ ID NO: 50560 - DNA, 201 bp, Homo sapiens
atcagatgtggtatcccaaaaacaggagctgctgtgcgaaagccatatgcgctcttctggaccactgcacatttcacaatacatttataagcttttcccarcttaggcagatgtgttaacgataattccactatgcttgcggtccactggttgatgttgttgtaattataatcttcaccacctaaaaccccgtctgcacat

SEQ ID NO: 50561 - DNA, 201 bp, Homo sapiens
aaaaaactaaaaatcaggatattaatttgtactatatgaaatcggttctatgaagcagtcttgaaaaagactttatcataagttatttttagtttgttcaragtgataaatgcatgggtgacatacattttaaagaaaactaaatgatggtggaaacataggcaaaaacaaaagcatggacatgaaaagaaccaattgcag

SEQ ID NO: 50562 - DNA, 201 bp, Homo sapiens
ctctctgtcctccttgatgcattagtaaaatggagatagtaatttttattattatcactgaggtattatttacatgtcatcaaatacacagaacttaagtrtatcatttgagtgttgataaatgtatacaccctggtaactaccactgaatcaagagatgaggcattccatcaacccaggaagattcgtcatacctgcttc

SEQ ID NO: 50563 - DNA, 201 bp, Homo sapiens
gtgtaaagcaaggaaactctagaggccatctcacttgtgatgtgagaactagaacatctggccatctgtccaaggaaggattaaggaagcttaccctacaycttgggttccaggtgaaatccattaaccacaagggctacatcaacttgaaaggaagacagtcctggagaacacagggcttacatttgctaaccccttgaa

SEQ ID NO: 50564 - DNA, 201 bp, Homo sapiens
acagttgagtccatctcaacttatattgcacaccctgtgtagccacttcctagttcttaagatagtctgtggttctgtatttttgttttgttgcatgtgtycccccattagaatgtcagccccaggaggatgaggccacggggatctgacctgtcttgttcacctctttatccgcagcacagcaccatggctggaaccaag

SEQ ID NO: 50565 - DNA, 201 bp, Homo sapiens
ctttaccaacaaaaaatatattatctgtgaataaaaccatggccaaggctattaaccacttcgattaatcactcacaagcggtcacaatgatcctatactmcatggcagctttattggggagttttgacttgttgcttgcttgattattaataactcgcaaatccatctctcctcccgtggagagttggtagttggctaac

SEQ ID NO: 50566 - DNA, 201 bp, Homo sapiens
tcatccacactgcttgcccatgtcttgttgccaagcaacagagcccaagtgggtgtgtccactagagccacacctacatgggatcattgcctgggcaaatrtggatctgatggagaccaaacgtctgatccatcatccaattacagttttctgaagcagcaacaaagaccaagaaacaatgcccaggcctcaattaagaag

SEQ ID NO: 50567 - DNA, 201 bp, Homo sapiens
agggatcatggcctccagggtcggtggtcctccctccgagggctgtccccactccaccctctgcagacagaagcattgatattctccacagttccctccayctccaggacccagtgcctcacagggcagccacgtggagttctgctcactttcccaaaccatacttggggaaacaatcatcttgtcacttggaggacttca

SEQ ID NO: 50568 - DNA, 201 bp, Homo sapiens
ggctgttcctcacagagagcaagtgtggcagggatcatggcctccagggtcggtggtcctccctccgagggctgtccccactccaccctctgcagacagargcattgatattctccacagttccctccatctccaggacccagtgcctcacagggcagccacgtggagttctgctcactttcccaaaccatacttggggaa

SEQ ID NO: 50569 - DNA, 201 bp, Homo sapiens
aacaaggcattcaagggatcttataaatctagaagagcataaattgagaggagcatcttttttaatattaggaaaaactattaaatgaatcattggcagartccagccaatgtggccccagagagaaatgacagaaattaaaccaaagctatattcccagcaatgataataatccatgtctatggagaagaccattgtaaa

SEQ ID NO: 50570 - DNA, 201 bp, Homo sapiens
gttattaaatgcaccagctgctgggccaagcataccacatgcattcatttctttagtccttacattgttctcacccccagttgatcaaaaaggaaaattakcacagagtccaagcaacttgcctgaagtcttgcaggcagttatcagggtggttgggactcaaatgcctgtctttgactccacagacctacgtttgtaacc

SEQ ID NO: 50571 - DNA, 201 bp, Homo sapiens
acctcccaccttaaaagataatcaaatatacaaaaatataaaagtactatctagttaccaaattactattttccattcttcagtccattattactttttcygaatcatgtttgttgtccttcacagtcgtatcaatcattctctttctcagaccaaagtcggtatctgttctaacttaacacttagtattcctcttaacct

SEQ ID NO: 50572 - DNA, 201 bp, Homo sapiens
cctgcacaagttcatgcccacctgactctgctacagggggaggagaaaacctcaccatggccacctgctgcgtgtcgtcatgtgactgccacaaaagcagrcatcttgggcacttgagaaagagtggctgtcattgttactattgtgattattctatcaaaacaatcacagccttataactttttctttttttttgagaca

SEQ ID NO: 50573 - DNA, 201 bp, Homo sapiens
agccccaccccatggcagttctctgcctgggccccgaggctctagggttagggttagggttaaagaactggagctcagagccagggttctgacatgctacrcatctcaagtgaactattaacattctacctaggaatgtgcacatggaactccttcctagttcctcgaggtctccaggactgtcaccgcttcctgagaatt

SEQ ID NO: 50574 - DNA, 201 bp, Homo sapiens
caccacagcttcataactttatcttacagttgaagattcataacacaagaagcattccccagggcctcctgggaagcaacacctatttcttgacacaaggmagtttaaacacttacttgcaatgatacacaataaaataaagatacaagccaccccgacaaccccaagtttgtcttttataagactggaacactacgattt

SEQ ID NO: 50575 - DNA, 201 bp, Homo sapiens
caaggcagtttaaacacttacttgcaatgatacacaataaaataaagatacaagccaccccgacaaccccaagtttgtcttttataagactggaacactasgattttgcatgttatctctaataggtcaaagaagaactctttttttttttttttttttttttttgagatcgagtctcactgtgtcacccaggctggagtg

SEQ ID NO: 50576 - DNA, 201 bp, Homo sapiens
ttacaggtacacaccaccatgcctgactaatttttgtgtttttagtagagacggggtttctccatgttggtcaggctggtcttgaactcctgacctcgtgwtccgacccctcggcctcgcaaagtgctgggattacaggcgtgagcctccgcgcctgacctaagaactcttaaacctccagaaagcatgcttcattttctg

SEQ ID NO: 50577 - DNA, 201 bp, Homo sapiens
aggtacacaccaccatgcctgactaatttttgtgtttttagtagagacggggtttctccatgttggtcaggctggtcttgaactcctgacctcgtgttccracccctcggcctcgcaaagtgctgggattacaggcgtgagcctccgcgcctgacctaagaactcttaaacctccagaaagcatgcttcattttctgcagc

SEQ ID NO: 50578 - DNA, 201 bp, Homo sapiens
ttcctgagcatatatctcctttttgctttaaaataagaatgtttcattccttttcttctcataaaagcaatacatggtcactgtaagaaaatcagaaaatrcaagtgagcaaatgaagagagaaacaagaaacatctggaaaatactgttcctaggctctcccaatgccacgatgccagccaaaaaaacctgacctgtgag

SEQ ID NO: 50579 - DNA, 201 bp, Homo sapiens
tgggcaatcagtggcctgtgttctagtttccccttctcagcctcgctgtcattttccctcccttagtcttagtcgctaaggccttccccatgagcgtgggkctcctgggagaaacagatacgacagccaccatagaagattcacacagacaggaacacaccggcccttgttgttctgccagtgaggctccttcttgggact

SEQ ID NO: 50580 - DNA, 201 bp, Homo sapiens
aaaaaactgaatgcccttgaaacagaaggccaagagactctctgcctgttgttgttgttcttatcagattcaaattcaacatacataaacaatttagaccygcactgtccagtacagacgcaaccagccacaagtggttatataataacatattagattagttaaaattgaataaaataaattgaacattcatttcagcac

SEQ ID NO: 50581 - DNA, 201 bp, Homo sapiens
tggctctgatgactacatcccaacttcttcttaatcactcttcagagttgctgctggagggaatattttaggaatatttaaagacaaggctacaaaaattytctaaggtacagatgagacagcgcattgattgtttactccctaaggggctgcaaagggcaaagcacagaactcaggtcttcttccagctggaatgtatgg

SEQ ID NO: 50582 - DNA, 201 bp, Homo sapiens
aagggagcttcagctgcaggtgaactcagaagggacttaggagactcaggagggacatcacagcatctactacattctccttccacacagaaggttccaarcgtaagtaacttgctcacagccgggcgtggtggctcacacctgtaatcccagcactttgggaggccaaggcagctggatcacttgaggccaggagttcaa

SEQ ID NO: 50583 - DNA, 201 bp, Homo sapiens
aagggacttaggagactcaggagggacatcacagcatctactacattctccttccacacagaaggttccaagcgtaagtaacttgctcacagccgggcgtrgtggctcacacctgtaatcccagcactttgggaggccaaggcagctggatcacttgaggccaggagttcaagaccagcctggccaacatggtgaaactcc

SEQ ID NO: 50584 - DNA, 201 bp, Homo sapiens
tgtggctggggaggcctcacgatcatggcgggagatgaaaccgtgtcttacatggcagcaggcaagagagagagtgagagccaggtgaaaggagtttcccyttataaaaccatcagatctcgtgagacttattcactaccacgaaaacagtatgggggaacccacccccatgatttaattatcccccaccgggtcccccca

SEQ ID NO: 50585 - DNA, 201 bp, Homo sapiens
atttgctgtgaacctaaaactgctgaaagacacatagacgaaagaaagaaagaaagaaagaaagaaagaaagaaagaaagaaagaaagaaagaaagaaagraagaaagaaagaggagagagaaaaaagaaagaaagaaagaaagaaagaaagaaagaaagaaagaaagaaaggagagagaaaaaagagaaagaaagaaaga

SEQ ID NO: 50586 - DNA, 201 bp, Homo sapiens
ccgggcacagtggctcacacctgtaatcccagcactttgggaggccgaggcgggagtattaagaggtcaggagttcgagaccagcctgaccaacatggcgmaaccccgtctctactaaaaataaaaaaaaattagttgggcatggtggcgcgtgtctttaatcccagctactcaggaggctgaggcaggagaatcccttga

SEQ ID NO: 50587 - DNA, 201 bp, Homo sapiens
catgcacacgtatgtttattatggcactattcacaatagcaaagacttggaatgaacccaaatgtccaacaatgataggctggattaagaaaatgtggcayatatacactatggaatactatgcagccataaaaaatgatgagttcatgtcctttgtggggacatggatgaagctggaaaccatcattctcagcaaactat

SEQ ID NO: 50588 - DNA, 201 bp, Homo sapiens
gaggagacgagtgttaatttgggtccccagatgtaggccctggaataaggacttaaatgcaagtagtttacttaaagagtgattctacaaaatactggtaraggagtggggaattgagataaggaaaggaaggcaggaataaagggtacatcataaagcaagttgtcactgtgggtaactggaactcaatcccactggaaa

SEQ ID NO: 50589 - DNA, 201 bp, Homo sapiens
catattgacagaaagggagtgactaattcgtaaatgtgaatgaagctttattttatttaagattaaaaagtgatgaacaagagagagaactaaattacagmcttgtggacggctacattacaggaattcatcacaatttcccttctggggcttcagagcttgactctgacttatgctttttggcatggaagtccgaaaatc

SEQ ID NO: 50590 - DNA, 201 bp, Homo sapiens
acaggagctcaggacaaaatcattagtaccatccagtgtttcgatcccacgctcccacgtgggatcccaacttggcaagatggccatgcccctgcgtgagygaggagaagccctttacctggaagggacgcagaccttaaaagcctgtccttcccacgagccctcctgcattcccccttggtcttggggaggatgaagaat

SEQ ID NO: 50591 - DNA, 201 bp, Homo sapiens
gagtccgatgcaggaggatcacttgagctcaggagttggagactagcctgggcagtatagggagacctgactctttaaaaaaaatgtttttttaattagcyaggtatggtggtgcatgcctatagtccctgctactcaggaggctgaggcaggagaatttcttgagcctgggaggttgaagctgcagtgagctgtgatcat

SEQ ID NO: 50592 - DNA, 201 bp, Homo sapiens
tttcttcatcaaatttacccctctatcctctgtgtatccctgggctcttctactccagtgatattcacaatcagctacttgaagacaaatcaaattgccargctggtgtttcagaacatgtggcaaacaaagtggtcccactcaagatttgttaatttgtgaagtggattcactttttaacactgaaacaagataggcaaa

SEQ ID NO: 50593 - DNA, 201 bp, Homo sapiens
ttgctgcatctcttctactcagttacccagacctgaattccaatcttgacttcaccaacttagacaatacttttgacatttctgaccctctgctttagcarttctcaacctttgtgccctgtctccctttgacagcatggtgacgtctatgggccccatcagtctaatgttctccaaattcattagataaaatgcactgga

SEQ ID NO: 50594 - DNA, 201 bp, Homo sapiens
ttgtgggctcattaaatatcaacataaaaacaatgcctcaatgttttttgatgtgtgagacatttttaagtggatgtaaaaccttcctccagaggccaagkgctctcacaagaagaaaggagccctgcatgagagtgtgtgtgctcagatgtcaggagtttataaatgtttcttcttttctcacacttgttcttgaaaact

SEQ ID NO: 50595 - DNA, 201 bp, Homo sapiens
gtgcacaaatgtcaaattaaggttcaaaagttgaactggaattgtgaaatagccatctgttcattttaaagaaaatattaactagtaccaattctatgaawctattccaaaaaatcaaggagactcctctctaacttattctacaaagccagcatcaccatgataccaaaatctggtgaagacacagtgaaaaatgaaaac

SEQ ID NO: 50596 - DNA, 201 bp, Homo sapiens
agagtggcctcctaactatgcatagactatgggctcagtttactgtagattacagtgaacactagcaatggacatgtcataagttaatgctttgaccttcrgattttaggacctaagactcaacatttgccttttataacatccatgcaacccacccctgcctgttatgtgacgcattccccctctcaggcctaagtttat

SEQ ID NO: 50597 - DNA, 201 bp, Homo sapiens
gtgctattgttaagatttttatatttgcatatagcagggaaacaggttgctgcctctgagctggaaagatgcaggttttaagagacaaacacaggtatacrccatcctttctttaagccacagctttataaaaacctagtcactcaaacccaggctagcaactagttgaatgccattgatttcttagaggaattaaccaaa

SEQ ID NO: 50598 - DNA, 201 bp, Homo sapiens
ccttgggaggtctctttgactttaggctttggggttttattctactttgttttgtttcaggcttgactaccaccagcaaaataatccccatgcttcattawattatattgtgatttttcttcttagtggttacattctctaaagtgaaatttttaatattacaatcttcctctagaataatcttttgactgttttgttctg

SEQ ID NO: 50599 - DNA, 201 bp, Homo sapiens
agaataagtctgggctgttttacaagatgctgtgttctaccactaaaaagagggttatcataaatattattagttatatatgagctaaccccaaaacatcwtgattgccttacaagtcaccttttatttttaaacttatgaaaatgttcccaattattcagaagcaagatcattttatatagagttctactgttaaaaaca

SEQ ID NO: 50600 - DNA, 201 bp, Homo sapiens
gtttttggagaaaaagaaacctagcagtacatcacaataaggcaggagccagaataagtctgggctgttttacaagatgctgtgttctaccactaaaaagrgggttatcataaatattattagttatatatgagctaaccccaaaacatcttgattgccttacaagtcaccttttatttttaaacttatgaaaatgttccc

SEQ ID NO: 50601 - DNA, 201 bp, Homo sapiens
gtcgaaaaaggttttggagattatcttccaatctaatgccctattttacttgcctagaagatgaggaccagaggaaaaactgacttggctaacaacacacmgtcaacttgtggctgagctgtgagttaaatgatgaaactgaagcaaaatcacttggatttctgcatgggagttgtcgacagtcatgaaattacactcaaa

SEQ ID NO: 50602 - DNA, 201 bp, Homo sapiens
acaacaatcattggttattgtccattcatctagacgtgggctggggtaaactgttctagatgaggctcagcagaaagcgacaatgctccacgtgcctctcwtctttcttaactactaatgggctatcccaggcatgttcttctcaagccaccagtgggctagcccaggcatgttattctcaagccaccagtgggatggccc

SEQ ID NO: 50603 - DNA, 201 bp, Homo sapiens
atgttcagctatcagtagcccccatggaactctctaaccagtatgtaccctcctggccctcccgaaagacttacagcctgagaaggagctgtgggcttgayatgcttaaaaagcatgctcccacagtgcatggagaaaggtctcttcccctacttcagcatctgcagaaggaaatggggatgtcccaaataatcagggtgc

SEQ ID NO: 50604 - DNA, 201 bp, Homo sapiens
aggccaggagttcaagaccagcctggccaacatggtgaaactccgtctctactaaaaatacaaaaaattagccaggcgtggtggcacatgcctgtaacccyggctactggggaggctgaggcatgagaatcacttgaacccaggagctgaaggttgcagtgagctgagatcacaccactgcactccagcccgggcaacaga

SEQ ID NO: 50605 - DNA, 201 bp, Homo sapiens
ctccagggaataattctctttccctttccctacttctgtaattggtatatactctaaatgccattagacccagcttgctctaaagatctgtagggatagtrtttctctctctccctcattcagtatgtgcccatgtcaggcctaactgaacacagggaccaaataaatagaagatattccattcagattttatagcctgac

SEQ ID NO: 50606 - DNA, 201 bp, Homo sapiens; identical to SEQ ID NO: 8722

SEQ ID NO: 50607 - DNA, 201 bp, Homo sapiens; identical to SEQ ID NO: 8725

SEQ ID NO: 50608 - DNA, 201 bp, Homo sapiens
aatcaccatgcagaagagaacccaaggaggacattcatctgctcttctatgtttagcctgaaggagacacatgcatcgcttctgcccattgcccactggcyagtattgggcaatagccctggctaaatgcaaagcaactgggaaatctgtgacaactaagggaatatttggtgagcattagagtctccactacagagagtg

SEQ ID NO: 50609 - DNA, 201 bp, Homo sapiens
accaatcaagataccaatcatcaatgtgccaaatgccatgtgagttttggggtgacttcattcaccagcagtgtcctaaccacaaatctatgttagaaaamttttaggataaacttgatagtaatggctgcttgaagattttgtttgtttgtttttcggggttttttttcatttaggttttgtttgttcgtttgtttgttt

SEQ ID NO: 50610 - DNA, 201 bp, Homo sapiens
atatgaatttgcaagggacataaacattcagaccacagaaggattgctggggtggtgtggacaagagcagaaagcaaacaaaagccagcgagtgccttctycctcctccagactttcagtcttcccccagctcccctctaacagcacctcccagggagcagctggctaagcaggacctggctgcagagtcccagccccagc

SEQ ID NO: 50611 - DNA, 201 bp, Homo sapiens
acccaacttcatccaaacctccttatctgttgatacctaaccttattacttagcagttatctttggggttacaagcaaagaaaaccaactctaactagcgraaacaagtaagcagtatgtcaaaaacatgtggtgtagccctcaggcctgaagaaccagccaacaccatcctagaaaaaagacagtgattggagcaaggct

SEQ ID NO: 50612 - DNA, 201 bp, Homo sapiens
ggttgcagtgagctgagatcacaccactgcactccagcccgggcaacagagtgggaccctgtctcaaaagacaaaaaaaaaaaaaaaaaaaaagagagagrtaagtaacttactcaggctcacacagccagtgtgggaactaaacccaggtctgattgatcaaccccaaagcccttgccctttccgccacctgaagctgcc

SEQ ID NO: 50613 - DNA, 201 bp, Homo sapiens
caagagaggatggaaaaccccaaagacatgctttggctccaacacaattttgtgaggtttggtccagtgcagcacactaatccagcactccagggaggackagaaacgtttaaagtctcccagcgctttccctttactgcgcctctggctgtacggacctaatgagatgccttgtgtttttcagaatgccgaagcaagtta

SEQ ID NO: 50614 - DNA, 201 bp, Homo sapiens
aggggaaacagactctgactcttgatggaagaatctgaaaagtcacatggcagagggagtgaatgaagtagacggagcagtggagtattgtggccattttygcacagtccaccataaaattgaaaagattgaccagagacagatcatggagggcttggcaatctgtactgatgaagccatggaccagaagagaagtgagtc

SEQ ID NO: 50615 - DNA, 201 bp, Homo sapiens
tcttagccaggacctctagcatttctggggttttcgtgggggcatttgaactgactcaactctgccccatgtggtctcccatcttccaggaggctagcccrgcttggtgactatgtaggatcccaaggagagcagaggctcccaggcttcttgaggcctaacctgagaactcacacaccaccacttctgccaaactctatc

SEQ ID NO: 50616 - DNA, 201 bp, Homo sapiens
cttccctgatttctcattattgctccatctatgcaagactgggttaaaccactgggttcactaacagaagcatttccagtgactccagaatctttttaacrtcctatgtaaagagttcagagcaatacatgatgaactgcacacaaactctttcggccttggtaactttcctgaggaaatagatgtcagacctaatcacaa

SEQ ID NO: 50617 - DNA, 201 bp, Homo sapiens
cgacactctatttgcatcttctcttagcaatgttatcctaaaaagaatcatcaaagcaaagattaactgttacaagaaaaaacaaataagcgagaagattrcttacaaatttcgggggttggtttattatggatgcaaaaatgagtagaaactcaagtccctgagtccacctttcatgacggtagtcctgattttgctatc

SEQ ID NO: 50618 - DNA, 201 bp, Homo sapiens
ttagtcaattactgctgcagaacaaagaatcccaacattgagtggtttaaaaaacaaccatattattatctctcacggttctgtgggttgctggagttcakctgggcagttctgcaagttccactggagtctatcatgcaggtggagtcagaaggaagttgaccctggagtcaactagaggctccaatgggaggctgaaaa

SEQ ID NO: 50619 - DNA, 201 bp, Homo sapiens
gaagatgtagtcactattgcttgggaaggggcctgcacttcaagagtggggtgtcgttgttaaaaagccttctaaaatcaatttagaaagcaagacactargattgcagaccatcatctacaggataagcaaagagagcaaatgtatttgacgttagaaatttgggaatgtgaacttaggtcttaggataaaatttccagc

SEQ ID NO: 50620 - DNA, 201 bp, Homo sapiens
catacaattggattttgcattttgatttaagctaaaagtatttttattttagtaaagcactttaagatattttctatgtattatcaaaacaaatacatttrctcttataacttctagactagctcctttttccgccctttattttatgcattatatttttattgctcttttccttcctcttacgctttgaaaacttaatcc

SEQ ID NO: 50621 - DNA, 201 bp, Homo sapiens
ttgcctgttttcctccatctcctctgttctcttcttctcaaactcttattacataggtgtaagacactctaggtctctcaacacttcttaccctcccttcmtttacttctttctctttgctctgggataattccttgaattcattttcttatttattagtttggtgtttagcaatgtccattttattgctaaattaaatct

SEQ ID NO: 50622 - DNA, 201 bp, Homo sapiens
caccaaattacaagtaattaatattgacactgtgaaaagtatacactctcattttgatatttggggaagaaagtcttgtctgtgcgtgtgccattgtgtcytataagcaacaactagaacacaataccctcagtgctagtaatcatgcaggattaacacagcaaaaatctgagagggaggacaaatggcaatgatacatct

SEQ ID NO: 50623 - DNA, 201 bp, Homo sapiens
tttgtgacagagtccttctctgtcacccagactggagtgcagtggcataatctccgtgcactgcaccctccaccccactgaggtcaaccaatcctcctacytcagcctccctggtagctgggactacaggcatgtatcaacatgcctggctaatttgtgtattttttgcagagacggggtttcaccatgttgtccaggctg

SEQ ID NO: 50624 - DNA, 201 bp, Homo sapiens
cctccagactcaggttctttcttctgagaagaaaccttacattttttttgggggggggggttgtgtttttgttttttgttttttgtttttttgagacagastctcactctgtctcccaggctggagtgcagtggttccatctcagatcactgcaacctccgcctcccaggttcaagcagttctcctgcctcagtctcctga

SEQ ID NO: 50625 - DNA, 201 bp, Homo sapiens
acctggaagaaaatgttcctgctctgagagaagtagaagacctggaaccacaggaccagtacttctcacccacacatctattgtatgggcctgggatggaratctgcgccaccaactgaatcttcaagcaagcacataaaatagtggtatttcatttctaattacacattctgtcagtcatgttgggtttcccctgcaatt

SEQ ID NO: 50626 - DNA, 201 bp, Homo sapiens
gttaaaatggggaggaaataagagaatgatacaaatgaagctgaggaagtaaacaggtcaaggaggggagggtggattctttcttgtctgctcaagcatargagcaagtggggtcatgcaattttattttataactagtggctaagcatccacttatcttatggaaggaggtcctcaattctccaagaaccctggtgcttc

SEQ ID NO: 50627 - DNA, 201 bp, Homo sapiens
agttcaagctcagcctggccaaaacagcaaaacctgatctctactaaaaatacaaaaattagccaggtgtggaagtaggtgcctgtaatcccagctactcrggcggctgaggcaggagaattgcttgaatccaagaggcgaaggttgcagtgagccaagattgcaccactgcactccagcctgggcaaaaaagtgagactc

SEQ ID NO: 50628 - DNA, 201 bp, Homo sapiens
tctcgctgggctttatagcaattttagaattggtcaacacttaattccataaaatagaataagtgttccaatgagcctagcagaagaggttggctttctasacagagaatgtaattgtactaggtttgttgcccgatgtgcatggcaaatcaatatgccaagacactggattgtgacagagaagagatttaaccatagggc

SEQ ID NO: 50629 - DNA, 201 bp, Homo sapiens
gtcattgcaggagccatggccaaaatccacatttcccatatctaatgagtgtgactccagccatgttcttcatttacatttatatcgttcacaggaatccrtgtagccctgacttttgtgggcattgttatatcaactccacccccaccattgccatctcatctggtttgggagttaacaaagctctgtcatcttctgagt

SEQ ID NO: 50630 - DNA, 201 bp, Homo sapiens
cagactctccagaaggaactgtcgaatttgatgagcacacatagagctagactaaatggatggggtgctgaggctgggcttccataccttaagtacctacraatcatgtgagtgattaaaagatttcttaggtcaggcctaatttctaatcatctctcactcaagccagcatatggccactgtatgagttcaagagtgagc

SEQ ID NO: 50631 - DNA, 201 bp, Homo sapiens
aaattcctttcttccatttagtagtatatcttagagaatttgacttataagtacacacatattgaatttttcttattaatgactgcataagattccaaaawgtagatatactatggtggaaatttctttcaaacttttcactacataaacaacattgcatgcttctttgtgcacaaatataattgtttctttaggatagct

SEQ ID NO: 50632 - DNA, 201 bp, Homo sapiens
tctggagtgtaaacttgtggccaagattttgagctctggataaattctagttttaatctcaggtccaccactcactcacttgccagttacataagtttacrttgttatttaacatctcacaaccacatctatacaatgtgggtaataataatattacttatctgaaaggttgatgtgagcattaaatgaaatgatgctagg

SEQ ID NO: 50633 - DNA, 201 bp, Homo sapiens
tatctttttaaaaaaattagtgattaaattaaaatttcttaacacactgtccaatctaaagaaaatacatcatcagaacaaatttttccatgcactaccaktttgcagtccctactctacaacaccccaggacaggatgaaacctgatagaacacctctatgactagtccgtgacttcattatttgccaaggtagtccaca

SEQ ID NO: 50634 - DNA, 201 bp, Homo sapiens
aattacaaattgaggtgggtcagttgtaagcaaaacagctactcaagcaagagaataaacggcaaaatgatcttctcctctgtgtgaggaacacaacagasagtggtggggactgtggtgaacctgagtgtacacaccctcttaaaaggaggaagcggattcttattctcagctaattgttacctccaataatggacgccc

SEQ ID NO: 50635 - DNA, 201 bp, Homo sapiens
tttttttcttttgcttagtagtctatgtgttgggtttacagttacagcatttttcacgttgtatatgggaagagggtgacagtcagaggcccctgaattaycagagggttcaataattgacttctgtcttagttttagatctcctagaagcagatcctgaggcaagatttgggatcaagtagtttattgggaaggtgaaga

SEQ ID NO: 50636 - DNA, 201 bp, Homo sapiens
ttggtagttggctaacgaagtatgagaaccatgtgttgtctcccacctcttctccctgccgtggttctgatatttctccattgatttctgtggaatagcargagtgttagttcccagaatttgttgagtatttactgtgtgtttggccttgtgttttatatgcatgatcacatttaatgagcgtgttaagccagtgaagtg

SEQ ID NO: 50637 - DNA, 201 bp, Homo sapiens
gataattttgaaagatgaatatttaggcaacatgtcagtacctcaattttctttttcatttaagattcttctgctccctactactgtattcgaaaccagcytagtggatggctcttcctataagcaagaactatttccttactataaagtgtgtacaatccacttggctgtgggttggagcggctctattagaattgactg

SEQ ID NO: 50638 - DNA, 201 bp, Homo sapiens
aggtgaagtgtgtttcctaccccttgactttggattgggccttgtgacatgttttaagcaatagaataatctagaactgacagtgccagtttggagcctargccttaagaggccttgtgtgctcccaactgcctacccacgcctctgccatcgccattagaagggcattcccaggctctcctgctgtaccctagaggaggg

SEQ ID NO: 50639 - DNA, 201 bp, Homo sapiens
gactatctccacccggacctggcctccaactatgtaagtacaagccaactttggtggggaaacagatgcatcttaaatgtcctggtgtccctggctattargaacatgcacatgtctacatgtctatacacatgcatgcaagtacaggagcatgcacacacacacacacacaggagtacagctgctggaacatatgcacgc

SEQ ID NO: 50640 - DNA, 201 bp, Homo sapiens
ccacattatcttctttaagaatactttactcagccaggtgcggtggctcatgcctgtaatcccagcactttgggaagccaaggctggtggatcacctgagrttgggagttcaagaccagactgaccaacatggagaagccctgtctctactaaaaatacaaaattagctgggtgtggtggcacatgcctgtaatcccagct

SEQ ID NO: 50641 - DNA, 201 bp, Homo sapiens
tttaaacattctgttaatgaatatgcacatgtgtgcacgcaaacacacacacacacacacacacacacacacacacagagagctatgggaatatgctgcamaaatctctgacttcagggaaaataattgaccaaggcccccagctgctgcactctgaaatctgtcactgtgccaacaaggccacactccccccagtgactg

SEQ ID NO: 50642 - DNA, 201 bp, Homo sapiens
gattccccttgaggacagaaacaagacaaagatgcctactctcaccacccctattcaacatagtactggaagtcccagccacaggaatcaggcaagagaawgaaataaaaggcatccaggaaggaaaagaggaagtcaacttatatctcttcatttatgatatgattctatacctagaaaaccctaaagactcaaccaaaa

SEQ ID NO: 50643 - DNA, 201 bp, Homo sapiens
gtttttccttgaatggagtcaaacactttctaaactcgagagaatatggccctgaaggaaactacgcctgttcctgtgatgaaatgacctgacaggaaagmactcagcatcttgctgacaagtcaggaagaactcacaacctgcccagtggtcattttagtcaattttggggggaaacagttcttttgaataggtccccta

SEQ ID NO: 50644 - DNA, 201 bp, Homo sapiens
agattgagtttggccagcacaatgctttcaatctgtttgacttgtggaggagcacgtaccctccagtttaccacaatcctcaccactttctattgtctttkacctgattcgcttagttagacagcctgcttgacccccaatatattaaatgtcttaccaatgcccaaagaactccataaccttagtcatccacactgaata

SEQ ID NO: 50645 - DNA, 201 bp, Homo sapiens
cattccatatctcttatgatgtgccttctgtcttgtgcttagcagagtcctagacagctcagagctaacaagtgcaatgtgcatcactcattggatcacarattgagtttggccagcacaatgctttcaatctgtttgacttgtggaggagcacgtaccctccagtttaccacaatcctcaccactttctattgtctttta

SEQ ID NO: 50646 - DNA, 201 bp, Homo sapiens
atttttccatgttgttcagagtacctggagttcattcattctcactgctgtatagtaccccacattctataagttacacctcaattagtttactccctatyttttggatggcatgtaggggtttcacagtttggggctaggagcattctagtacacaggtctggtgaatatgtacacatttggtcaggtatatgcctagga

SEQ ID NO: 50647 - DNA, 201 bp, Homo sapiens
gtaaacatctcaatgtcaagacagtatttttacacattgcaatattcatgaataccgtgagtggacataatcaaattaaatcacgagataagttaggaacsctgataatatgaaaaatgtaataactttgatatttttgtcagaatcactcatcattattttaaaaaataccaagtaataaaaaaatacaagaaggtcttt

SEQ ID NO: 50648 - DNA, 201 bp, Homo sapiens
tatcctccctttacagataagaccccaaattgagagtgacttctctttttggacaagtctaaactttgactcttctaacaaaattcagatagaaaatttaygatgccaagacactggtcaaagctcaactattaggcacagagacctctgccctatcaagcacagaaaacaaaatttactcatatccaatgtacatttcct

SEQ ID NO: 50649 - DNA, 201 bp, Homo sapiens
atctgaagttcaatttttcattgagttcagatccaacgtttcaaaaagaaactctgtgctgaatttgtgaattattatttgagatacaaataatcacgggrcagctcaaaaactgacatttctatttgactttccttattaaggtgtatttatttagctaaagtccacaagtgattaagaagtcaagaaattacatctgag

SEQ ID NO: 50650 - DNA, 201 bp, Homo sapiens
cctttacaatgttgggtcatacccttcaagaatatggcatatctcaatttattcacatctggtgggttcttcagcagaatatcatcattttctttatttargtcttacatatgtcctgtaggtctagtctcaaggctcttatagctgggttattattgtgaatactttttcttattaagttttctggggtgttttttttta

SEQ ID NO: 50651 - DNA, 201 bp, Homo sapiens
aaaagattttccacagtagctaagggaaaatagcaacctgtaaccttgcttccctagacatggctgccattcatgttgtgccttagatcgaatccaagctmatccctcaagacctgtctggttgacctagaccacagtgttctctatccatttggtgctttgatgatgtataatcgattcctttccctgataccagtcata

SEQ ID NO: 50652 - DNA, 201 bp, Homo sapiens
acctaggcaataccattcaggacacaggcatgggcaaagacttcataactaaaacaccaaaagcaatggcaacaaaagccaaaattgacaaatgggatctwattaaactaaagagcttctgcacagcaaaagaaattaccatcagagtgaacaggcaacctacagaatgggagaaaatttttgcaacctactcatctgaca

SEQ ID NO: 50653 - DNA, 201 bp, Homo sapiens
ttcaatgtaatttttttgtctgtttttgcttttgttgcctgtgcttctgagtttttatttaaaaaattcttgtctagcccaatttcaagatgcattccacytatattttcttctagtagtttcaggtcttacaattacatctttaatacatgtagagttgatttttttagatgctgagagattggagactagtttcattct

SEQ ID NO: 50654 - DNA, 201 bp, Homo sapiens
tctattgtttcttttgctgggcagaagctttttagttcaatgtaatttttttgtctgtttttgcttttgttgcctgtgcttctgagtttttatttaaaaamttcttgtctagcccaatttcaagatgcattccacctatattttcttctagtagtttcaggtcttacaattacatctttaatacatgtagagttgattttt

SEQ ID NO: 50655 - DNA, 201 bp, Homo sapiens
cacagggacattttatttttaatattttggggaacgtccacattgttttccataatagctgtactaatttacattcccaccaacaatgtatatgagtattsgtttctctacatccttgctagcaattgttattttttgtctttttgacatttaccattctcactgggataaggtggtattttgtcatggttttaatttgca

SEQ ID NO: 50656 - DNA, 201 bp, Homo sapiens
aacaaaaaaagagaattttagaccaatgtccctgatgaacattgatgcaaaaatcctcaataaaatactggcaaaccaaatccagcagcacatcaaaaagyttatccgccacgatcaagtcagcttcatccctggaatgcaaggctggttcaacatatgcaaatcagtaaacgtaatccatcacataaacagaaccaatga

SEQ ID NO: 50657 - DNA, 201 bp, Homo sapiens
gttggggttttctaaatatgaaatcaaactgcaattctcatgacccactgtgcttttatttatttaatcatttttacttaactgattcactattttaatargtagttttaaaagttaactctacattaccgccataaatggaaaatctcacttgccatataaataagacaatcataaaaatagataccgtctacccctaaa

SEQ ID NO: 50658 - DNA, 201 bp, Homo sapiens
tcctctttttcttttgccttcaccttttaatttcttctggccatgctttctcctcacatagctcctatctctgtctttttgctatgcttctccttatttayacctcagtcaacaccagcattttgttatgaaagaaaagctgcaggtcagtgccacaaagaagacaatttccccaggaaatgaacacttcagtacttcttt

SEQ ID NO: 50659 - DNA, 201 bp, Homo sapiens
gcctagctgagcccagcccagagcacctagctgccagctgaactgtggactcgtaagctatctaaacacctgctgttatatgctgctgacatattatggcygtttttgtgtagtaactgttacagctgcccatgctagacccccttctccatcctcctacagtacttgaggtgtaccccagtctggagagaatattggctt

SEQ ID NO: 50660 - DNA, 201 bp, Homo sapiens
gcaggtttgaagcaagagacaggagcttactatccttcctgcgacaccaccctaacaaaccgcctgcacccaagacctttctccgggtctgctttgggggacaacccaacttcatccaaacctccttatctgttgatacctaaccttattacttagcagttatctttggggttacaagcaaagaaaaccaactctaactag

SEQ ID NO: 50661 - DNA, 201 bp, Homo sapiens
gaaactcgatcccttccttataccttatacaaaaattaattcaagatggattaaagacttaaatgttagacctaaaaccatcaaaaccctagaagaaaacytaggcaataccactcaggacataggcatggacaaggacttcatgactaaaacaccaaaagcaatggcaacaaaagccaaaatagacaaatgggatctaat

SEQ ID NO: 50662 - DNA, 201 bp, Homo sapiens
cattgagaattactatcccttgacaaacaagcaatgttagcagagaatcaccaaaagccctgctgggctagaaccacacactctaacttttgactcagcarttcacacgctgctttcctgatgaagcccacaagccctttaaacagaatcgatcacttattttaaccccagggagtacaagattcaagcattggtgcgttc

SEQ ID NO: 50663 - DNA, 201 bp, Homo sapiens
agccaaaccatatccaaccccaacacttagcagcttgaagttgctatttatctttaatcatgattttgtggcacaaaatctgggaagagcctggctgggcrctgctcactcagtgttgctcatgcagttatgatgttagctgggctgcagtcttctgaaggccccgctgggctgcacatccatgatggtgcactcctatcg

SEQ ID NO: 50664 - DNA, 201 bp, Homo sapiens
ggacctagtgctggttttcatcatctgtccactctggcttctgcagtaacaccattcccattggcctcggtggtcagttcacccagatcctgcctaaaccytggatgcttattgtcctgaccacccgaatgtcctaggccagctagttctcagcgtcacatcctcaccaacctccgctccctgctctccactggggatcaa

SEQ ID NO: 50665 - DNA, 201 bp, Homo sapiens
aggccaactgatttctcaaagcatgcaatttcaagctgaaaaattaacctaggttattttccactcagttaagtatcaaaaagattttgaaaaataaaaamaagaaaaagaaagaggaaaaaaaccaacatgagcatgttcttaactaatgagctatgcttatccactgttccactagaagagaattttccaaatatggac

SEQ ID NO: 50666 - DNA, 201 bp, Homo sapiens
ctttctattttatcatgacctggccctggcccaaagacctatgtctatcagaaaagatacttaagtctaggagagtgaatgagtttacagtaatgacaaargcattattccaaagagtgccttaaaattctcaaaatgctactaattttaattgatttgaaacagaaaacaaaaattatttattgaagcaacctgttgaag

SEQ ID NO: 50667 - DNA, 201 bp, Homo sapiens
cacatgcattcatttctttagtccttacattgttctcacccccagttgatcaaaaaggaaaattagcacagagtccaagcaacttgcctgaagtcttgcargcagttatcagggtggttgggactcaaatgcctgtctttgactccacagacctacgtttgtaaccattatgctagatggtgtcaagaacctgccctgttt

SEQ ID NO: 50668 - DNA, 201 bp, Homo sapiens
tgtggaagagagttaggggatccttaaaactctggaattgtgaaatgccagagacagaatgtctcctaggctaatgtaggtggttcagttgtggccagcarggtggttctttgtctctaaagaataagtcaagagaaagggtgggaggatggagggcactcagcacatgggagcttagaataaatgagagtcagggtgacc

SEQ ID NO: 50669 - DNA, 201 bp, Homo sapiens
agatggtcaacctcactcacccatttattgtgaaacacatcagttgtactttgctttttttttttttttttttttgagatggggtctcgttctgtcacccsggctggagtgcagtggcacaatctcggctcactgcacctcccgaatagctgggattacagacatgtatcaccacacccagttaatttttgtatttttagt

SEQ ID NO: 50670 - DNA, 201 bp, Homo sapiens
tagtagagacggggtttcactgtgttagccaggatggtctcgatctcctgacctcgtgatccgcccacctcggcctcccaaagtgctgggattacaggcaygagacaccgcgcccggctcttcctaagtattttatcctttatgtggccagtgtaaatggggctgcctgtagggtggctgtgaagactgaataggataata

SEQ ID NO: 50671 - DNA, 201 bp, Homo sapiens
tgttagtcagactggtcttgaactcctgaccttttgatccacccatgtcggcctcccaaagtgctgagattaccagcgtgagccaccgtgcccagctaacyttatgtttttaaaattgttgttgttggttttgttttcaagtgaactttttgcctgttctgtcaggatcatttcaggagagtagcaaccctaaagaaaact

SEQ ID NO: 50672 - DNA, 201 bp, Homo sapiens
acagtattttggggtttctaaaagcagcttcaagcttgtacaggagaatgcagaaggaatatgggaaaggctagagtccttctgccttaaccatcgccggrgtactaactagaaagtcaggactagcttaaatgtataatggttgtgactaaaaccaaggcaagcacatgaaaagcaacacattagtaaaacaagcaaaat

SEQ ID NO: 50673 - DNA, 201 bp, Homo sapiens
gactcaaatgcctgtctttgactccacagacctacgtttgtaaccattatgctagatggtgtcaagaacctgccctgtttcttggagggttagatgctcargtgtaactgctgcaaagcttatgtggttttgcaaacccaaatgagagcttttcaattgcccttggagtttcttgatgctttctgaggtccaagggtctga

SEQ ID NO: 50674 - DNA, 201 bp, Homo sapiens
aataaatgaacaaaaaagctttatcaattcactgaataggtaattaatcaaacctttgcaggtttagcactatgccatatacacaaaaactaaacaaaatrttatcattgtaattaagttgaacaggatgcattttgctactgttaggcattcgcattgtgagtgctacagtcttttcttagcctgacatttttctgcaaa

SEQ ID NO: 50675 - DNA, 201 bp, Homo sapiens
atagtgttggattcctctttcctggaaccccttcatttccctttctcagattatttccgcattccgatgcagaatgtccttcatgagaggcgactttttargacttttaatctgcgttcaaatcaattaatagtttgacggttatcaactattaggttgggaataaacatctctcagaaatttgcaagtgtttctctgtta

SEQ ID NO: 50676 - DNA, 201 bp, Homo sapiens
gttgtatgcctttgaaaagctgtcagagacagtacttgtcaaaactgtcaaagtcatcaaaagcaagaaaagtctgaaaattgtcacagccaagaagaacytaaggaactatgatgaataaaagtaatatggaatcctagatgagattataggtcagaaataagacattagttaaaaactaattaaatctgaataacatat

SEQ ID NO: 50677 - DNA, 201 bp, Homo sapiens
ctctatccataggtagagtctatttattcacccatgtgaaggctctgtaacattttatctggtagaacgtggtgggagtgatactgggccaattctgggcmtagccagcccctacctgacctggtagcttctactccttcctcagagaagctaaagaattgtgattaccctgagaactccatgctgtgagtaggccaagcc

SEQ ID NO: 50678 - DNA, 201 bp, Homo sapiens
tgggtgatccttgggattgagactttcccataagttcagcactcatgtttataattgtattggcagcaatactgccatccagtctctggctattgagaaarggtgggatacaccccgggatgcttctgttgtcctaaaatgattggaacatctctcttcatgtgtgaccttctgcaatagggcctggctcctcctctatcc

SEQ ID NO: 50679 - DNA, 201 bp, Homo sapiens
acactgtccaatctaaagaaaatacatcatcagaacaaatttttccatgcactaccattttgcagtccctactctacaacaccccaggacaggatgaaacytgatagaacacctctatgactagtccgtgacttcattatttgccaaggtagtccacataaaagttcttccttaagggaattccaaagctacttccttgta

SEQ ID NO: 50680 - DNA, 201 bp, Homo sapiens
gttgtatttctacttaaaaggtaaatattcagggatgatacctcctatatttctcatttcctccctgtaaccagcacattactgttttgccagccttgaargaaacttccttgtctgtatttattatcccaggtttcccagacaccgtcctatcttgctttcatcatactgttttgtacttttgccaacatttgttattgt

SEQ ID NO: 50681 - DNA, 201 bp, Homo sapiens
gtttaattattataaaatttaacagaagagaaaatcaaaagaaaactatggaaattgttaaacttcagataaatatgctatacaaaggagatattatttcytaatatacctccctaaaattcataagaaattattgtgtctcatatttaggagtttgtagttacatattttatacatacatggtagataggttacatatat

SEQ ID NO: 50682 - DNA, 201 bp, Homo sapiens
aaaagatttccattgaaaacatctactttttaacatttggtgctaaatttgtaagttcctgtttccgaaaaaaattcacttaagttgactaatttatttcytgataaatattacatgaatatctcatatgaatatatttctttaaaaatttaggcacctataacctgattcttatcccaatagaagcaattaaggggcagg

SEQ ID NO: 50683 - DNA, 201 bp, Homo sapiens
tgtcaaactcagccttctgggttttccagctctgttgcatattttatcctaaatgaacatcccttcagttatttcagcagaattttgatagggaaggaaasagagcacgtgagctcaaatcaccttaaaaatgagtcttgtatttctggcagattttatgctgcatatttttaaattaattatcataattttttatcagaa

SEQ ID NO: 50684 - DNA, 201 bp, Homo sapiens
tataactagtggctaagcatccacttatcttatggaaggaggtcctcaattctccaagaaccctggtgcttcagagtcagcagtgccattagcaaccacargtggcgctgtcctttctcaggagagcaccaatcctacaactcctttggttaagattataaccctggccagccagtattcccccaagccaccctagtggga

SEQ ID NO: 50685 - DNA, 201 bp, Homo sapiens
ccatcaggctggcctacttgcctcaggcagctgacagccattccactcactgagcatgagctgcaggattagggtggagaccccgccccccagcagacagycccacccacagtgctggctcttgggtcatggcctccctttgtccttcagctccagggccaccctctaatccatgggtgaattcccatttcccttttgggt

SEQ ID NO: 50686 - DNA, 201 bp, Homo sapiens
cagctggagagagaccccagggtgagttttccccagaaacctgcctcccaatctctgctgccatggctgagcccaccaagggggtgtggaggggctggcarggaattttgaagtaaaggcacttaatgtactatgatagggcaaatgaatgctttgcagagtcatatcagggactctctgctcctttgtctctgcataata

SEQ ID NO: 50687 - DNA, 201 bp, Homo sapiens
atatgccacagctgattgacatctacagcgccagctggggccccacagacaacggcaagacagtggatgggccccgggagctcacgctgcaggccatggcygatggcgtgaacaaggtaagggggccggccccctaggccccggccactcacaagttgggacaaagtgggtggaggggtagatgcaactgggtgaaccact

SEQ ID NO: 50688 - DNA, 201 bp, Homo sapiens
acaatcataggaccagtagccaggaaaggaagagaggtaaaaaaaaaaaaaaaaaaaaaaaaaaaaaaagacgaaaaaatatctccacatcaaaattatcytaaaatccactattccaaaatgcctgaaaaaaatacacctaaaaaaactaaaaatcaggatattaatttgtactatatgaaatcggttctatgaagcagt

SEQ ID NO: 50689 - DNA, 201 bp, Homo sapiens
tggaaaaaaactactttaaagttcatattgaaccaaaaaagagcccgcattgccaaaacaatcctatgccaaaagaacaaagctggaggcatcacgctacytgacttcaaaccataatacaaggctacagtaaccaaaacagcatggcactggtaccaaaacagatatatagaacagaacagaggcctcagaaataacacc

SEQ ID NO: 50690 - DNA, 201 bp, Homo sapiens
tgttcttttttattgttgcgtagcattcccttgtgtgatgtaccacaatgtgtttatctgttttccagtctgggaacatttggataactttcagtttggasgattataaataaaatcgttatatacatctacacacagatttttgtatagaatttagatgtcctctgtcttgggattgaggggctgtatggtaaaccaact

SEQ ID NO: 50691 - DNA, 201 bp, Homo sapiens
gtgggaatcagcctccatctagcctaatacatgcttcactggccttctaaaatagcaagccgagcaagaagacatagacaggcaaaggccactctaaagayaccctccggaggtgtctgcctcggctgttacttagagcaactgtttgctccttcctgcaatacagctgcactcctccaccacagggttttggaaaatatc

SEQ ID NO: 50692 - DNA, 201 bp, Homo sapiens
ggctctgaggtatctaatccaacagtctcttttcacagatagaaagatagagactttgagaggtgcaatatgttggcccacagccaagtggtatacatacytagtactagcagagcctgcaatagggtccctggcaacaggcttctaggtctatcctcaaaatgtgctgctgccattctctctactgtccaccttgactat

SEQ ID NO: 50693 - DNA, 201 bp, Homo sapiens
tctaccccaaatgctggcatcactaagaacaaatgggacaagaaaacccaccctttacttctacctcctgaggctcctcagtaaggagatattgaagcttytagagtaaacacacaggcggcatggaggaagagtcatgcaggtccccatgaaaagatatctgacttgagatcactcccatttgatagcagtagcatttgc

SEQ ID NO: 50694 - DNA, 201 bp, Homo sapiens
ggccaaatctgagagggtctcccaggaacacggattgcgggccagatacagaattaaacttttaaagtgaatgaaagcaatctggggtctaagtggggaargagtcgaaaaactggcaacttgccagtagttatggtcagtggagacgagaagacttcctcctctctgaaagccaagtgttgaatgaagacctagatcctg

SEQ ID NO: 50695 - DNA, 201 bp, Homo sapiens
agggcagcccagccagggaagcccattgatcacagaggcattaaattccagatttgaaggtatggatggcagtgccagggccaggtgcaatctcaggagcytcagaagcttctctgtggatgtaaaagcaatgggcacagccaccattgactgcaggagctctcacctctctcatcaccagccattcagatagacaagccc

SEQ ID NO: 50696 - DNA, 201 bp, Homo sapiens
aatggaatttcccaacatgaaggtggaaggaagagacaggttccaatgccaggtttagaagtgtcttctgagatgttaactgaattttgcggcagactgttggtgcatcctctgtatcagggagtctgcaaactatagccaaacccagtacgcggtctgcttttgtaaatacagttttgttggagacaactgtgcttgttt

SEQ ID NO: 50697 - DNA, 201 bp, Homo sapiens
agaaaccttcagggacacctaacataagatgatatctgcaaaacatatatctctaaaaaaagcagacaaaaacacaatcacttagcgcgggcctcattagrcacctcataagttcaggcactagggtcctgaaggagtcttgtgcacaggaaattcaggaggggagtcagcagtgagcttaaagcctcgctccaccaccag

SEQ ID NO: 50698 - DNA, 201 bp, Homo sapiens
attgtaagcctacagtaatcaaagcagcatggtagtggtacaaaaacagacacatagaacaatggaacagaaaagagaactcagaaataaagccacacacytacaaccatctgatcttcaagaaagtctacaaaagtaagcaatgggaaaagggctttttattcaataaatgatgctaggataactgtctagccgtatgca

SEQ ID NO: 50699 - DNA, 201 bp, Homo sapiens
ttccttttttcctcttctcttattatttgcactctgaaaacacctgagcattgagtgctcatcaaatgtatctaattctcctgctgtcttagtttgctctkcctaaaagcaaaacctgagacaaggattccgggcaagcagttaatgtgggaggtggtccccggaagccagagtgagggagttggggaagaagacaggaaa

SEQ ID NO: 50700 - DNA, 201 bp, Homo sapiens
tcacccttgtctccctggtcagctggcaggttgctgggggctgattggtttaggatgacctcactcacatgttgatggattactgttgactggggtgtcargcattacaggttatgtgtctttcatcatccaataggctagcccgggcttactcacatggagcctagacagggtggcaagagaaagcagaaaagccacatg

SEQ ID NO: 50701 - DNA, 201 bp, Homo sapiens
tgttgtccataaaaatctctcttgcatagcatttctttgacaggtgttcactactgaaatgtcatccctgccattgacgatatttatgaagcattggggaygcagcatactctatctattaaaccctaaacagtgagagattctaggttagatgcaattcttggctgcagaaagtttactataaattcaggaagagagaag

SEQ ID NO: 50702 - DNA, 201 bp, Homo sapiens
gtatgtatacatgtgccatgttggtttgctgcacccattaactcatcctttacatgaggtatttctcctaatgctatccctccccatccccccaccccccmcacacacacatgacaggccccggtgtgatgttccccttcctgtgtccaagtgtggaacttgcttcttaatagaagaaggtctgcattcaagagcacatgg

SEQ ID NO: 50703 - DNA, 201 bp, Homo sapiens
gtattagttggtaataaaattctaagttcacttcctttacctcaagaaacagtggagctattctctttatcttcatgggtagacagccctgtttcaactcytgaattcacacagagaaccaggatccaggccgtgctgtgaatgagatttgtttgaccccagtcatcagaaaagctttgaggaacgcactatgatgttgtt

SEQ ID NO: 50704 - DNA, 201 bp, Homo sapiens
gctgcaggtgaaaaggccctttcaagtgtgattgtcctgcaaagcatgccgagcccgctgaagcttaagagaaaaattgttatgactgatcttcagatgayagcaagtacatcttttagaaagtggagtgagtatgatgaaaaatacattatttcacatttgacttttccccaagaaatgggaataaatttccccaagcaa

SEQ ID NO: 50705 - DNA, 201 bp, Homo sapiens
caccaccatgcctgactaatttttgtgtttttagtagagacggggtttctccatgttggtcaggctggtcttgaactcctgacctcgtgttccgacccctyggcctcgcaaagtgctgggattacaggcgtgagcctccgcgcctgacctaagaactcttaaacctccagaaagcatgcttcattttctgcagcaaatgag

SEQ ID NO: 50706 - DNA, 201 bp, Homo sapiens
tggtgagaggagcaggttgatggggagtggttagggaattaagagtttagttttaagcacgttaacatttgagatttgtattaagtaaccaagtggagatratgtgaaatgaacagatggacttaaggatctaggagagaggtcagagttggagatataaattgagaggcatccatctattgttagtgttcaatgccagga

SEQ ID NO: 50707 - DNA, 201 bp, Homo sapiens
agagtttcagtttgagatgattaaaaagttctggtaatggataatagtgatagttgcataatgtgagtgtacttaatatcactgaactattcacttaaaartcattaaaattgaaaagttgatgttatatatatttatcacaataaaaacattacttttaaaaagaagcagagtttccatatacccttctttattcagctt

SEQ ID NO: 50708 - DNA, 201 bp, Homo sapiens
ctgaagtttaagtgaatttggaaataaatgttaaaacctggtatcaatgccggaagcagcatgggagtgagaggtcagcgtgtgctcggccctgtgccacctgggggactgtggaccagcactcccgagctgcagaggcttcctgcacaagttcatgcccacctgactctgctacagggggaggagaaaacctcaccatgg

SEQ ID NO: 50709 - DNA, 201 bp, Homo sapiens
acctgtagaatcaaaagacagtaatctcctagagtttttggtgaaataattgtctgatttttatgcaaattccaaatcagatatcctctcagcctaaaatrtcctccaatggacaagcatgtgccctgggattcccatcctcccatgggccagcagcctgccatagatgggctgcctaccataggtaagcatcctcccacg

SEQ ID NO: 50710 - DNA, 201 bp, Homo sapiens
aactgaggcacagagaggttaagttacttgtgcaaggttacagggctaataagaagtggaggcaggatttgatgccagtgggtcattggtctaggattttrtctaaggcaataggtagagttgggagtagggaacgaatgtatcccagggcaaggatataatctggacaaagataggctggcggggaggtgcaggatatgt

SEQ ID NO: 50711 - DNA, 201 bp, Homo sapiens
aaggctccaaaaattgagcacttccagataatgatgaagttcatggaagtgaattatcaaagtaaaaaggagatgaaggtgatcaagacactaaaagtaayatgcacaaggatttgttcacatacacctcattcatgctatggcaagaaataggattgtcaaggaagactgttgagagaaaacaaagcgaagtcctaggac

SEQ ID NO: 50712 - DNA, 201 bp, Homo sapiens
gggtttccctagaagcagactctgaagcaagggtttgagtacaagtaggttatttggaagaggattctaggaagcaggggtagaggacagggaatgagtcygggaaggaaaggtagcttgtaaacggggcagttatcaaacaagacagcactgtgggcactgaggcttaatctcactgggcagctctgggagacagcatag

SEQ ID NO: 50713 - DNA, 201 bp, Homo sapiens
cagccataatcgtggcttaacttggtattctttgaaaacttaagctgtgtaatttgcctgtaattgggctttccaaaaagtcatatctcctgctcaaggargcaattaagccggcacactccctgtctgctgcctgctccctccctcctggcatctgactgccatgggccaagtcttccctccgcagacctctctcctctc

SEQ ID NO: 50714 - DNA, 201 bp, Homo sapiens
atccaaattacaccttactatactgttaacttttatttgtctatatcatttgttggaatccagaaaacatactttgtttctttccaggaaaaagtcaggtrtaaaaataagtgtgtgttgaaatataagcacattttaaaaagaaattagctcctattctcattcctgcagcttggcattgagtttgtctgtaattgggtg

SEQ ID NO: 50715 - DNA, 201 bp, Homo sapiens
ttataagataaaattacaaaagtattaggcaaattaattaacaatatgcatctacatggttaatctatttggaatttatttttgtgtatggtgtgatacargaatttcttttgtagttagctaattgactcaatatcacttactgattaatttatctagacctgattgtttgaatttattatatacaaatggtttaaaatc

SEQ ID NO: 50716 - DNA, 201 bp, Homo sapiens
actctgaatgagatgtggcttctgtgcctatgggcaaataatagacaatggggtagaggtatggatgagggacaactggactagagagatccatgcaaggygattgcaatatttcagaagagaaaagccagtggcataggccaggatagaagtggtggaggcagtgagaaacaaatcagatctgggagtatgttgtgaagg

SEQ ID NO: 50717 - DNA, 201 bp, Homo sapiens
gaaagagacatttaaaaggcttgggctgggaaagagaactgaggcacagtagaactcaaaagtccctgtttggtcagagagactatttagcaccactggcytgagcttttcccattctaacacatatgatctctgaaatgctgattcttgaagtatacagtgacacttttaaaatataaaatgggactaattgggtaataa

SEQ ID NO: 50718 - DNA, 201 bp, Homo sapiens
agcctgactcccaccccttctgctgaggcagccatgagttagccccagcagtctccacagttcactggctacacctgccctcattagaagtccacagcccygtcctcccaacagagccatctgtgtctattgaacccagtgtgtgcactgctgtgggcgcctgttacccagtggcattgatggaattaaaatgcatctccc

SEQ ID NO: 50719 - DNA, 201 bp, Homo sapiens
agatttttccatgttgttcagagtacctggagttcattcattctcactgctgtatagtaccccacattctataagttacacctcaattagtttactccctrtcttttggatggcatgtaggggtttcacagtttggggctaggagcattctagtacacaggtctggtgaatatgtacacatttggtcaggtatatgcctag

SEQ ID NO: 50720 - DNA, 201 bp, Homo sapiens
cttccttggaacttgcttcttttctttttttctttttttttttaattatacttttaagttctagggtacatgtgcacaatgtgcaggtttgttacgtatgyatacatgtgccatgttggtttgctgcacccattaactcatcctttacatgaggtatttctcctaatgctatccctccccatccccccaccccccacacac

SEQ ID NO: 50721 - DNA, 201 bp, Homo sapiens
atgtattgagacacaatatcagtttctaacccttaaggagttttcaaagttaattttaaccatgcataagttccactttgcacactttagaattcactccctaaggcgtgattcttctaggagaaattaaacaaagatggggtcttcattttggatttcccagaaacagactctgagatgcagagttgtatgccagagact

SEQ ID NO: 50722 - DNA, 201 bp, Homo sapiens
tagagttctcatgcactgctggtaaacatataaactgttaacaaactttatcaagaacaataatatggcagatggactaagaatcgtcattcattttttttcacccagaatttcctcttttagaaacactgcctaagaaaataaacatacaaagacatatataagattatgttcattttaaacataaagcacttttttaaa

SEQ ID NO: 50723 - DNA, 201 bp, Homo sapiens
gtggctcacacctgtaatcccagcattttgggaggctgttgtgggcagatcccttgaggtcaggagtttgggaccagcctggccaacatggtgaaactccrtcatctctactaaaaaaaataaataaagaaaaataaaaattggctgggcacagtgctatgtgcctgtaatcccagctacttgggaggctgaggcaggaga

SEQ ID NO: 50724 - DNA, 201 bp, Homo sapiens
ttaaaacatttccattttcaatttctctaaagatgcatgtgctgactttaaattacttttgctgccttgatcattaggaggaaaatgttaattgggttcargggaacttgatgctgtaaatagaagtactatgctctgaaagagaatggtgagggaacagccttgcacacgagaaaaacaatccattctgttagaagtcag

SEQ ID NO: 50725 - DNA, 201 bp, Homo sapiens
gaagtagacattggcttggtctggaaaggcaggacatcttgaagcaggggcttccaggttataggtagattcaaagattttctgattggcaattggttgarttattacctaaagacctggaatcaatagaaaggtgtgtctgggttaagataagggtttgtggagaccagggttctttttatgtagatgaatctcctaagt

SEQ ID NO: 50726 - DNA, 201 bp, Homo sapiens
atagaaaataaaatgcactataggggacactcaaagaagtaaaatgttccccttggttgggagactgagttcaatagcaacacatctctcctaggttttcytgacactttaaaccatcatctcataccctctgcatttactcattgttttcctttattaaactccacgccaagggtgctttaggaaaacaaacttcataca

SEQ ID NO: 50727 - DNA, 201 bp, Homo sapiens
tgaacactaagcagccccaagccccattgccttggggtaagaaagtgggaagcaagaaactaatggtccaatcctgggttgtttaggtagagaggaaaatmctcagaagacaaggaaaaggatttttaagaacctctaagaacatggtttgaggagaagagccatgctaactgtagggacttatgcaaagtttgccattta

SEQ ID NO: 50728 - DNA, 201 bp, Homo sapiens
actgcaatttcccttctctctcctctccttttcctcctctatacaacccactcactttccaattttggtgacgtggcagttctgcatggatctttccagaytttttttctcccccaactgcaatcatacagtacaccgtatcatgcaacctgctcttttatttaacaacatattctctccaacagtgtggatattccgtca

SEQ ID NO: 50729 - DNA, 201 bp, Homo sapiens
gcatgagatgacattggagaagtagaaagagaaccgactgtataaactttctgagccatgaggattcataacttcatcctaggagcaaagggaagcttcakggtggcagggagggggaataacatgcctagatttggcatttttcaaagatttgcctgctaaagagacagattgggagtgaacaagaaaggaggcagggag

SEQ ID NO: 50730 - DNA, 201 bp, Homo sapiens
atgattttgtggcacaaaatctgggaagagcctggctgggcgctgctcactcagtgttgctcatgcagttatgatgttagctgggctgcagtcttctgaargccccgctgggctgcacatccatgatggtgcactcctatcgctggtggttgttgctggttgccactggagctcagctgggaccgtcaaaaagagtgccca

SEQ ID NO: 50731 - DNA, 201 bp, Homo sapiens
acctctgtatggatctctaggtttcttaagcaagaggccactttctttaacatgacctggaagagctggcatgatctggcacctacctacctattcttatmagggttcttaggtttaacaacagaagtagaatctgggtaactaatgcagaaaatgaatttattacaagggcatctctcacagaatcagattagcaagatg

SEQ ID NO: 50732 - DNA, 201 bp, Homo sapiens
agctgtggtatgcctgaaggtcatctcaggtttagtctaatccatatttctctccttccatcataagaagtcatctcagcactagaacaactcttttcacrtagcgaaggaccttatagttaattcacagaaacttcatgtatggtgggctgtggtcttatttctagcaaaagtggctgtctcatctctgattcttagcca

SEQ ID NO: 50733 - DNA, 201 bp, Homo sapiens
gagcattggttttatgtattcttatttcagccaggtttccatagctcctgagggtgattcttcagagacacaagcagaagaccacagttagcagccaatgyccacagtagctggggtggtgcacagcccagggaaggggatctgaatgaggcactatcactatctaccaaaacacccttagctgtggtatgcctgaaggtc

SEQ ID NO: 50734 - DNA, 201 bp, Homo sapiens
tagtaagtgaaagtctgtgatagcatctgagtgacaagagaagaaccactttgcataatatgtagtgtgtgtgtgtgtgtgtgtgtgtgtgtgtgtgtgtkttaagcaaggaagaagatctaaaactcactcatttgactattaaggaaataatcatttgctcttacaagtaggtaggcctagaggaaaaaaaacaaaaag

SEQ ID NO: 50735 - DNA, 201 bp, Homo sapiens
tattggagtaggatgggcccctaatccaatatgattggtgtccttatttaaaagacaaaaaaaaaaaaaaagaacaggaacatctgggcacagataggcayacagggagaacagcatgtgaagatgaaggcagaggggctggggatgcatctacaagcccaggagagccagagatggccaacagcccaccgggagctggga

SEQ ID NO: 50736 - DNA, 201 bp, Homo sapiens
ctgctattgaggctctctgataaatttttaaattctgttatgtactttttagctccagaatttctgtttggttctttcttcttattatttttatctctttrttgatattctttatttgatgattcaacattctaacactttcctttagttctttagatatggtttctttgaacatatgtctgggtatagtgatatctatat

SEQ ID NO: 50737 - DNA, 201 bp, Homo sapiens
ttaagagaacaaagtgatgatataaaaaaggtgtggtgtgtgtgtgtgtgtgtgtgtgtgtgtgtttcaatgaagaaaacatttcaaaacatactaaatgmccgcagtatgagaggcttcttactaggatactcaggtgaatgtttgggaatctaccactgtgttcaatatgtctttgctatttgcaagatttgcagtcta

SEQ ID NO: 50738 - DNA, 201 bp, Homo sapiens
taaatgttaaagaaaaaaaaaacccacaaaattgcttagacagttttagtggctacataattattttatgtggggaaagattctcagtgggaaaaaggaargtgctggatgacagagaatagtacacttttgaccatatgctgtagggcataagagttcatacagatacttattgaagtttgtaatggtacatttctttgt

SEQ ID NO: 50739 - DNA, 201 bp, Homo sapiens
ttgaacccaggaggcagacgttgcagtgagctgagttcatgccattgcactccagtctgggcatcaggagtgaaactctatctcaaaaaaaaaaaaaaaaatgcaccaagagggatcagggcaatgagatagattcaggcaagacctcatagtgcctgggaccagacagacatcctgatccaaggtggctgcaggatgcca

SEQ ID NO: 50740 - DNA, 201 bp, Homo sapiens
accgtctacccctaaaatctgccatgtacagctcaggttgggcacagcacaccctgagaactgctggacctggatgtgcttgtagtcaagggtcttggaargaacagccgtggtcatcagttcacacagccaggatacaggggatatgcccttatgtgacatagggcatatatgatatagagtatatgtccacacattcca

SEQ ID NO: 50741 - DNA, 201 bp, Homo sapiens
accaataaggatcatgcagacaggtagatctgggtccaatcctgcctctatatttagttactgtgatttgaaacaagttaattaacctctctgttgtacaygttgtacattcctgagatataaaagaaggatagcaatatgccttcatgttttcattcaacacctagttattgagagctatgctacaccagaaactgtagt

SEQ ID NO: 50742 - DNA, 201 bp, Homo sapiens
tatggcaggacctgtgaatatgatgagatatcactcttacaattaggttattagattgcattatatggcagagttagagatttttttcagatgtcatcaargcgcctaatcagttgactttaagctaatcaaaggaaagactatcctgggtgggcctgaactaatcaggtgagccctttaaaaggtaatctacaagtcaga

SEQ ID NO: 50743 - DNA, 201 bp, Homo sapiens
agcataaacagataagggttttcttttctcacagaaatggaatctggaggcaggcagtatagagctgatatgagagctccacaaagtcataaggaacctargctcctttatttttttggctctgtcattctgaacatataacttccaatctcgagatcacaaaatgactgctgaaactctactgtcacatccctgttccag

SEQ ID NO: 50744 - DNA, 201 bp, Homo sapiens
gcggatcatgaggtcaggagatcgagaccatcctggctaacatggtgaaaccccgtctgtactaaaaatacaaaaaaattagccaggggtggtggtgggcrcctgtagtcccagctactcgggaggctgaggcaggagaatggcgttaacctgggaggtggagtttgcagtgagccgagatcgcgccactgcactccagac

SEQ ID NO: 50745 - DNA, 201 bp, Homo sapiens
cctcacccaaccacaaagaggcctggtcatgggctcagaccgtggacagtttgcaatatttagcaagcagcagcaatgactaccacaatgtgtaccgaaasagttaggtagctcaagaggtaaccagttgacctagtgaggacaaatgtgcaaatgtcgaagatgtttgtgaatagtttgaataaaatttgccaaagatgt

SEQ ID NO: 50746 - DNA, 201 bp, Homo sapiens
caaaaccttgtaaatgccccagtgctttcagcctgaggacagatgcacagagcagcctttcagcctcttgggaggaagcccttagacaaaaagatgcataygctgacatttggaaactcccaggcacagggaattctaaagcccaagggatatgggctcacacacaactcccaaagtgcagcttaagcaaaacctaacctg

SEQ ID NO: 50747 - DNA, 201 bp, Homo sapiens
gagcttaatgccactgggaaacttcagaaaaccacaccaaaacttgagaacacaccccaaaggtatcccaccctgtgggaaaggagctggaataaaacccrttgatgaggtttgttcccaaaaccttgtaaatgccccagtgctttcagcctgaggacagatgcacagagcagcctttcagcctcttgggaggaagccctt

SEQ ID NO: 50748 - DNA, 201 bp, Homo sapiens
agtttactccctatcttttggatggcatgtaggggtttcacagtttggggctaggagcattctagtacacaggtctggtgaatatgtacacatttggtcargtatatgcctaggaaaagaatttccaggccatagcttaagcttaactttagaagatacagccaaacagttttccagtttagttggaattacttgcacgct

SEQ ID NO: 50749 - DNA, 201 bp, Homo sapiens
tctggaagttgttcttctctctccctttgctctgaagttgaaactcaggcctgtctattaggtacctttagaattatcactgagatcattttaccttgcamacaatccagggaaatcagtaatcatctctgggcagatatcagtaatgtgcaaaacccatttcctacttgacttggaaggagaaagaaatgttaggaagag

SEQ ID NO: 50750 - DNA, 201 bp, Homo sapiens
tcctgcccagcctcacatttcttgccagatcctcgccaccttcttttatctgccccttggtttctttagtatctcctcctctcatgggtgtgggcagattyttcccaggcagagcaggtcagatctccttgctctctaggcacccatgacctcaggtacccaccaaccatcacagaattatcccaaatagagacagtttcc

SEQ ID NO: 50751 - DNA, 201 bp, Homo sapiens
gctcacgcctgtaatcccagctcttttggaggctgaggcaggcagatcacttgagctcgggagttcgagaccagcctgggaaacatagcgagacccccccyaatctctacaaaaaaatacaaaataataataataatggtaaggtgagcatgtatatgagatgaacttgcttttgccaaagaaaaaaatacacctgatata

SEQ ID NO: 50752 - DNA, 201 bp, Homo sapiens
tgtgactagaatgtattttcctgaagatgtcacaggtgccaggaggggatttatgttgcaaacacaaagaactttaagtaagcacttgctttgaggagtcrtttcatcccctcatcactgggcacgggcggtggcctcttcctgcccagcctcacatttcttgccagatcctcgccaccttcttttatctgccccttggtt

SEQ ID NO: 50753 - DNA, 201 bp, Homo sapiens
aaaaaaaaaaaaacctctgaggttggcagaagtgtgcaaccttatttgataaatggtaactaagactcagaaaagtaaagtaattgggtcaaaatcaaacytgtaggctaggaccctggtcttggatgctaggaactatgagaaagatggatatcagaagtcattagaagctcttctattatcaaaactttctcagtggtc

SEQ ID NO: 50754 - DNA, 201 bp, Homo sapiens
acactctcagacacactcactggaagcagatgaagctattagtcagtcattccccagcctctgagaaggaatatttttcttgtagatgttttccctcatayatttgcacatgttacacttccatttgttaatcgcctgtccttatcttacccgtttacctattcctatagtctatgatgcaatacttttatgcattttagc

SEQ ID NO: 50755 - DNA, 201 bp, Homo sapiens
gactgggaatctggggatggggtgtttttcctttctgtcccagaacgccctgtcttcctcatgcaaggtgatgagctctcacccaagggctggctctgcargctggatcacacagctgtacatgcccttccccacttcccattctaaatccacctgatcaagctggactccttcaccaggcccttccaggaacggacaact

SEQ ID NO: 50756 - DNA, 201 bp, Homo sapiens
gctcacgcctgtaatcccagcactttgggaggccaaggcgggtggatcacaaggtcaggagatagagaccatactgactaacacggtgaaacatgaaaacyttgtgttataatcaaacggatggactatgagggggtaagctgttaaacaatagagtaatagaaagggggaacaaaggcagaaatgagcctctgagcagta

SEQ ID NO: 50757 - DNA, 201 bp, Homo sapiens
tgcagggaggcctgtgatggataaggagagagggcagaaaagcctcagacgcgatgcctacctggctcctgcaaacgacagtgggaaggaaggggccgggsggggagggtctcagacagcagtccccacgccaaagctgcccatcacagacagaaaggggcctgcactggcacccccaccacccactcagtcgttggctgg

SEQ ID NO: 50758 - DNA, 201 bp, Homo sapiens
gcaatgggaataaatttccccaagcagtgggaataaatctttccttgtttcaaggtgacattttttggacaacattgtagcattttggaagtgagggttcrttgtgcattagcgaaggttttctcctagtgacttccactgcctggtctactctaaggaaaaatccacttctgaaaggcaatcttcacacaaacaaaggag

SEQ ID NO: 50759 - DNA, 201 bp, Homo sapiens
aaagagagtcgggaaggtaggagatgtgtgccctctgtccagactgacagtgcagatggtggcagcgctccacatccctgggtgcccctgtcattttccayggacttctgcacttctccactgcctctcgaagcaggatatttctctctcctccatctgtagcctccctggctgcaggtgaaaaggccctttcaagtgtga

SEQ ID NO: 50760 - DNA, 201 bp, Homo sapiens
ctaacccccagacttgctttgcaaagacagtttccttgggacacagccaggcccttccaggtctttgtgacattctgggcacctccaaccacagctgtcaygggtcccaggggaaggaagcacatagggcaccaaatgaaggggctcatctctcagaatcaggcttttctggatgctggtcaacgtctctgtcttcactag

SEQ ID NO: 50761 - DNA, 201 bp, Homo sapiens
agggaaaatagtctggatgctattggctcattcattcgttctactaaaggtggaatgatatgttaatgtcttatcagccaagtcaacctagaaataagaakgtcaaccatgttaaattgtaagattattcaatcttatagattataattccctatagcatgcagagttatttcacaggctttatcttcttaatttgacaaa

SEQ ID NO: 50762 - DNA, 201 bp, Homo sapiens
tctcctgacctcgtgatccacccgcctcggcctcccaaagtgctgggattacaggcgtgagccgccgcgcccggcctgcagtcctcattttaaggcctgcstattttatgcttctccagtgttttcctttttccctttctagtcttctgctggaataaccaactttactttatttctcctgccctcacacatgaaggttag

SEQ ID NO: 50763 - DNA, 201 bp, Homo sapiens
aatctaggggtaaaaagtgtctttcataggagtccaaaaatatcattgcccacaccttttggcaagaaatattgggaagtataattttgtgactgagcacwttgcagtcctcagtaatataagggttctattaggaaggtcgaatacagcgcatggatattgagtagataagcagcaacctctaaatgtgtcccatatctt

SEQ ID NO: 50764 - DNA, 201 bp, Homo sapiens
tagtggaattttccttgctccagattttaaggacacactcaacttcatccaggccccagcacatcacagacccacctatgagtcagtactaatggcagtaytagtggcctcaaaggacatttgaagaaaaattgttacttaccagaccccaccagagctgctgagatgatcccatgtaaccctaactacagagttaccttt

SEQ ID NO: 50765 - DNA, 201 bp, Homo sapiens
tacttatccacttctcctctacacaaacctctctttatgagtacagataaggaaaacaagcctgccaaatgacagtttgtcattgcaggagccatggccaraatccacatttcccatatctaatgagtgtgactccagccatgttcttcatttacatttatatcgttcacaggaatccatgtagccctgacttttgtgggc

SEQ ID NO: 50766 - DNA, 201 bp, Homo sapiens
acttaggtttaaaacatttgcaaagtgttgtaagtcattagagaaaaaagttttgacctggaatatttgggtttcactcttctaaagttttaagtagagggcaaagagattgtcagccttgctttctgtgtaaacacagtgtctggcaaaactaagtctacaggaaatatttgttgaatgaattacttgattgatgttggt

SEQ ID NO: 50767 - DNA, 201 bp, Homo sapiens
acctctttgtcctcctaactgtgcaatggaattaggcttctcccttatcgacaatgaccccatacctaacttcagccttcctggaactccctttttatctraacacttctcctggccctgatgaagaatgcagtccagaaggaaagccagtgaactttaaggtcaggtgctcctgtcccttgggagcaaacctcggtaaag

SEQ ID NO: 50768 - DNA, 201 bp, Homo sapiens
atgtataatcgattcctttccctgataccagtcatagccatcagaacgctcactgtccccaatacacctcttgtggctgaagaaaatgaggaacaataatrttgaaaggtaaagatgacaggatttggaatcagatagcactggaaacttggctaggttactaaatctctcagaggctcattgtcttctgaaaatggttaa

SEQ ID NO: 50769 - DNA, 201 bp, Homo sapiens
aaatacattggatttacattttctttgaagtataaggaaacgtgcagtctgctgggatccatcacactgcttggtctggaaaaagaggagggtgaattcaraactcttgtccctctctaaattcttgtaaccttctaatctctctggagtgtaaacttgtggccaagattttgagctctggataaattctagttttaatct

SEQ ID NO: 50770 - DNA, 201 bp, Homo sapiens
gtaataatgccagatatttattcaccaaatatttgtcaagcttaaaataaataccaagcatcatgttgatcctcaaggacatggaagtgaacaaaatagayacatgccctatactcaaagaccatgccatctggtggtatatgaaacacgcaaataagtagttgcgatagaaggttaaaggtacacaagaagagggctatg

SEQ ID NO: 50771 - DNA, 201 bp, Homo sapiens
agactaggcttattctagataatcttcctccaggagaaagaatgctaactgataactgggtgtttgttgtcaaaaatggtgattacacttatgggttaatrgtagaagatggataagcagagcctgttattcattcttctggacctgttatttgtgttggggagaaaatcaactaaataaggtaataatgccagatattta

SEQ ID NO: 50772 - DNA, 201 bp, Homo sapiens
ctctcactcggtctactctctgtctccaccccacattcccctgtagctcctagagcatccaggggcagaggagaggccttccctaaaaacccttgggtcaygctgagcctctgtcttggcttggtgcagttgcttgcaaaattaatactgtatctcattcaattaatgcatgcctcattcctcttgagcttaacaagatta

SEQ ID NO: 50773 - DNA, 201 bp, Homo sapiens
ctgattatttcagagtagtattgcatgctcacttcccgtatctcccacattttaaaagctattcttctattagcacatcttaaaatcattttagcattttktggaagtcatagatctcacattgattaatagtgaacctacaattagctaaaatttctaggttcttctaaaatacactcataatccatccttgaaggatcg

SEQ ID NO: 50774 - DNA, 201 bp, Homo sapiens
agaaaaaaccttaccctccaattaaggaaaataaaattataagttgttgttgatttaattctgatcatattttcatagatttcagaaagatatagtttttwaaagaatttcctgttaagattcaaaattttttctaggatataatttctcactcctcaaacctctgcttcaaaataaattttattcaatatttagcataag

SEQ ID NO: 50775 - DNA, 201 bp, Homo sapiens
ggaggcagtgagaaacaaatcagatctgggagtatgttgtgaaggtagtcttcaaattcgttgatgcatttgctgatggattagatgaggaatgggagagraagtgagaaggcaaaggtgactcctaagttgttggcctgcattactatagaatgaaatggcacttatgcatatggacaagatggtgagaggagcaggttg

SEQ ID NO: 50776 - DNA, 201 bp, Homo sapiens
tttctaacccttaaggagttttcaaagttaattttaaccatgcataagttccactttgcacactttagaattcactccctaaggcgtgattcttctaggaraaattaaacaaagatggggtcttcattttggatttcccagaaacagactctgagatgcagagttgtatgccagagacttcttggagagcaaggaagagaa

SEQ ID NO: 50777 - DNA, 201 bp, Homo sapiens
ggtaaaaatagaaattagatagttttagtgcctttttaagggatttatacccaaagaataggctgttttttatccttatacttgttaactctaagaggatraggtctgaggttgtgaggtgctgctctgagaaacatatagaaattttccaatttatcttccaaatgttttattgaaggaaaaaaataaagcatatagatt

SEQ ID NO: 50778 - DNA, 201 bp, Homo sapiens
gatgaaagagagtttgtcaaagcccattctgaagtgaataacacggtcataagaatgagccatggggaatatgacaaacagcctggtgtggccaaagggtrgtggtggcagtggcagaagagaagcagcctgagagatggttagggccagaacaagagccataggatctctcctagtacaggtgggcttcaactatccgcg

SEQ ID NO: 50779 - DNA, 201 bp, Homo sapiens
atgaaagagagtttgtcaaagcccattctgaagtgaataacacggtcataagaatgagccatggggaatatgacaaacagcctggtgtggccaaagggtgrtggtggcagtggcagaagagaagcagcctgagagatggttagggccagaacaagagccataggatctctcctagtacaggtgggcttcaactatccgcgt

SEQ ID NO: 50780 - DNA, 201 bp, Homo sapiens
aggagctgctgtgcgaaagccatatgcgctcttctggaccactgcacatttcacaatacatttataagcttttcccagcttaggcagatgtgttaacgatwattccactatgcttgcggtccactggttgatgttgttgtaattataatcttcaccacctaaaaccccgtctgcacattctttgacaatattgtgggcttc

SEQ ID NO: 50781 - DNA, 201 bp, Homo sapiens
ctacattaccgccataaatggaaaatctcacttgccatataaataagacaatcataaaaatagataccgtctacccctaaaatctgccatgtacagctcargttgggcacagcacaccctgagaactgctggacctggatgtgcttgtagtcaagggtcttggaaggaacagccgtggtcatcagttcacacagccaggat

SEQ ID NO: 50782 - DNA, 201 bp, Homo sapiens
attaatataatatataatatatgtaatatatatgtatggttatatatttttaatatataatataatatatattatattaaatataatatatattatatatwatatatattatatttaatataatatatattatatataatataatatatattatattatatataatatgatataatatatattatataatatattaaaaat

SEQ ID NO: 50783 - DNA, 201 bp, Homo sapiens
cacactagtcttatggaagcaaaataatttaattaaaaaataacctgaacttcatttcttgagagaggttatatttgagaattaaaaacatttatttcctytactaagcaattttactagaccatacaattattcctcatttttaaacatgtttcagttttacaagtcagaaacttctatcagtccaataaaaactttcct

SEQ ID NO: 50784 - DNA, 201 bp, Homo sapiens
tataaaacattttttggatagtcttcttggagaaaatgggatatcaccttatattagagattggagatcaccttttatttggatttttatttatataaaawtacatatattatgaccaggcacggtggctcacgtctgtaatcccaacactttgggagtccaaggcaggcagatcatgaggccaggagttcgagaccagcc

SEQ ID NO: 50785 - DNA, 201 bp, Homo sapiens
tgaacccaaggtgggcaccagtagacaaagatcaccctggtgcaccgtgacatttgtcttccctacacttcaaccctatgccataaccttgccatttatgkccagttgttttccttttagttatgtattttcttaaaagtcccattggctactcttcttccacgattaaaggcgttgctccaagattattcagaaacatat

SEQ ID NO: 50786 - DNA, 201 bp, Homo sapiens
cagtcagtgagcagctcacagcaggcagtggacttctcagtatccatgcatgactgtggccatgagactatctcagcctttctttttatcctatattttcyagcactgatctaatttgccttcatgtctcagctgtctacttgatgttcatcacccccatttttttaatcttcagtctttaccttgctcttggactccagg

SEQ ID NO: 50787 - DNA, 201 bp, Homo sapiens
gtgtgtgtgtgtgtgtgtgtgtgtgttaagcaaggaagaagatctaaaactcactcatttgactattaaggaaataatcatttgctcttacaagtaggtargcctagaggaaaaaaaacaaaaaggtaacctaactccaatactgccaaaaaagaaaacatgaagaatttttactttgttatctgtgtttttcggttttct

SEQ ID NO: 50788 - DNA, 201 bp, Homo sapiens
gtggccaacaaacatatgaaaaaaaatgcaccaccactggtcattagagaagtgaaaatcaaaaccaaaatgagataccgtctcacaccagtgagaacggygatcattaaacagccaggaaacaacagatgctggagaggatgtggagaaataggaatgcttttacactgttggtggttagtgtaaattagttcaaccatt

SEQ ID NO: 50789 - DNA, 201 bp, Homo sapiens
tttaaattctgttatgtactttttagctccagaatttctgtttggttctttcttcttattatttttatctctttattgatattctttatttgatgattcamcattctaacactttcctttagttctttagatatggtttctttgaacatatgtctgggtatagtgatatctatatataatatcatgtgaatatttatagtt

SEQ ID NO: 50790 - DNA, 201 bp, Homo sapiens
agatttatcagattgagaaagttccctttcattcctaatttttttttttttttgagacggagtctcgctctgttgtccaggctggagtgcaatggcgcaakctcggctcactgcaagctctgcctcccgggttcatgccattctcctgcctcagcctcctgagtagctgggactacaggagcctgccaccacgcccagcta

SEQ ID NO: 50791 - DNA, 201 bp, Homo sapiens
ctcctagtacaggtgggcttcaactatccgcgtttttacatgttgctttggcaaacttgagagaattgatgaatgccttctatcccttcaccaagattgtrttgaatcctcttccatatacctaccagcagtgttctaggctctggggatacaacatactccctgatttcatagagtttacattctctatgaaacagataa

SEQ ID NO: 50792 - DNA, 201 bp, Homo sapiens
atgaatcaagccgggaggatttttccaaatctacaggaagtgaaattcttctgctccaggcaatgtttatcacccatgtagaaacctcattggtttggcarttgtgagctaacagggtatggcctgagttatgctctgaatagcttacagttactgccttggatgtgaacgatttgggagggacaagtctgtgcagtggcc

SEQ ID NO: 50793 - DNA, 201 bp, Homo sapiens
gtctggcgctgggtgaatgtgaatcgccgacacggtctcctgcagggctgcggcgtcctggcccgtggctgtcattctgtcccggtgcttcacccccggcyggtgtgaagccagtgtgaatccatggcccgcgcggacacacccgccaagcaggcacaggagcaaggggctctagctgcgtccactccccagggttaaaaa

SEQ ID NO: 50794 - DNA, 201 bp, Homo sapiens
gaaatgtaatattgtgatgtggcagacagattataagagttgaatgcaccaggagatttcctgtggcattataagagttgaatgcaccaggagatttcccrtgacataagtaattctcaggccctatgaagtgcaggctttaaaaaaatctggttcagcagccaaaagtcatcaaaaattaatgctagtattttctctctc

SEQ ID NO: 50795 - DNA, 201 bp, Homo sapiens
cctctccacctcaatacaactcccccaatccctccagcatcctttttggacattttcattccagttcctctttattcatgtgcacattcaattgccagacmgtttttgaaagagtagaaataagaagtaacagaaaatagaaataataataaaatactacccccaaaataaaagagacatgggaagagtttcttttttcaa

SEQ ID NO: 50796 - DNA, 201 bp, Homo sapiens
cacagccctagcaaactaatataatcggttcacagtcatctttttggtacttccagaaacaggagattaagtaacatacccaagattacaaagctattaaygtggagccagggttctaacttcagtctactgaactacaaaaccaagttctgcatattttaaactttcctctgaagcagaaacaaattataaatagggact

SEQ ID NO: 50797 - DNA, 201 bp, Homo sapiens
agacgccctctgccccttcccctctcctccctggggcagagcggcgcccggacctgctcgctgccatggcaacgcggcgctccctcccatagacagtgcamcctccacgaagtcaccgagcagctgctaccgctgtgtctccgccagtgccatttctgcttcctcgaattttaaattggccaggataatacaacaaattaa

SEQ ID NO: 50798 - DNA, 201 bp, Homo sapiens
tcaagttcttgatatccacatggggctagcagctgctgaaattcaattccattttcatcatcacagatagttacattagcgtgactctacatccataaaamagcttttcagtaacaggattggagcttggggaaatttgactttattgctgctttcagaatgaacccttgtaaagtagcctttgataaccttttattacag

SEQ ID NO: 50799 - DNA, 201 bp, Homo sapiens
taagcagccaaactgggatctgagcccagtcactttgacccctcacggtgggctctcaggtatctcagtgactccccctggagaaggtgaggcttgggtargggagggagtttcagtaaacattcccctggggattctgaaacacccacctagtgggtgctcccatctcccaaaccccatcactggcattccagaggccct

SEQ ID NO: 50800 - DNA, 201 bp, Homo sapiens
cagccacttggtgtcttcatgccttcactcctaacctctcatgtggttgtcggggaaaataactgagataatgtacatgagtactcagggcactgcccagygcaacagtcagccctcagtaagtgtcagccatcactagggtttatccttattttacaggtgagcaaactgagtcttaaatgggctccacagcttgctgga

SEQ ID NO: 50801 - DNA, 201 bp, Homo sapiens
tcagtgatgctttgtacttttcagtgtatacatcttgcacttcttttgttaaatttattccccagtattttacttatttgatattattttaaattgacttrtattcttaactttatgcttggattgttcattgcttgtgtatagaaatataattgattttgcatgttaatcttatattctgcaaccttgctgactcttttg

SEQ ID NO: 50802 - DNA, 201 bp, Homo sapiens
ctatagatttgtctattctggacatttcatataaagaagtgatacaatatatgaccttgctgtcaggcttctttaacttagcattaagttttcaaggttcwtccgtgtttttaccatgtgtcattgcttaattcctttccatttagaaataatattccattgtacatatatatcattttgtttactgttttatcaattgat

SEQ ID NO: 50803 - DNA, 201 bp, Homo sapiens
atgtttcttcttttctcacacttgttcttgaaaactgttccaaaggggttcaggccagctcacccaggaaaacaatgcatcaggatttggggaaaacctamctaggagatattgtcatgaccatttctaacagcatatcctactgggtatccccagccggggatcagagaagccaccctaaaagtggcactaaagtgccaa

SEQ ID NO: 50804 - DNA, 201 bp, Homo sapiens
agggatgtcccttgagagcctttatctgagctgctccaagacggtgtcatcagttgacagacagaaccaatattattgtagagttttatgttaacacagcygtgaaagctgaagaaataaaacttttttttcagctagctacttgtttctgtagtccattgctgagtaacaaaccaacccaaaatttggtggtataaaaca

SEQ ID NO: 50805 - DNA, 201 bp, Homo sapiens
gagtactggtcagttatgagtttgtctgatggttctacctgaataaatacacgttatgtatttttggtgagaaaatcacatgaacaatgtgcccttcttartgcatcatagcatgactcatcactggtgaagttaacttagatcgcttgggtaaagtggtctctgccaggtttctccactataaagatacatttcccattg

SEQ ID NO: 50806 - DNA, 201 bp, Homo sapiens
tcatcatctgtccactctggcttctgcagtaacaccattcccattggcctcggtggtcagttcacccagatcctgcctaaaccctggatgcttattgtccygaccacccgaatgtcctaggccagctagttctcagcgtcacatcctcaccaacctccgctccctgctctccactggggatcaagggaatgcaggatggag

SEQ ID NO: 50807 - DNA, 201 bp, Homo sapiens
aggaattccaggccaaaatctcatggattcctagtcatggttacaaaggggctgggacgtagagtaggaccaccacacaagcagtgtggatttacactcargagagctgggatttctgcagagagctcccattcatctggtcaggccctggcaccccctgagccacagtgtcttctctaaaaaaatgaggcagctagacca

SEQ ID NO: 50808 - DNA, 201 bp, Homo sapiens
cttttatttatttcagtaggttttggggaaacaggtggtgtttgtttacatgaagaagttctttaatggtgatttctgagatttggcacacccatcacccragcattgtacactgtccccagtgtgtagtcttttatcccttgccccctcccatccttccccctaagtcccccaaagtccattgtatcatttgtatgcctt

SEQ ID NO: 50809 - DNA, 201 bp, Homo sapiens
gtgtgtatcatattttctttatccacacattgattgatgggcatttgggctggttccatatttttgcaattttgaattgtgtggctcatcacagcatcacytatttcatgataaatcagtggttgaatcagtcacatgctcatccaggtcaaagagaggaacacaggttctacctcttgatgagaagaatatcaaagaact

SEQ ID NO: 50810 - DNA, 201 bp, Homo sapiens
tttgcaattttgaattgtgtggctcatcacagcatcacctatttcatgataaatcagtggttgaatcagtcacatgctcatccaggtcaaagagaggaacmcaggttctacctcttgatgagaagaatatcaaagaacttacagatatgttttaacactgtcacaattgtaataccactttataatattgttgaaagaatt

SEQ ID NO: 50811 - DNA, 201 bp, Homo sapiens
ttgcaattttgaattgtgtggctcatcacagcatcacctatttcatgataaatcagtggttgaatcagtcacatgctcatccaggtcaaagagaggaacayaggttctacctcttgatgagaagaatatcaaagaacttacagatatgttttaacactgtcacaattgtaataccactttataatattgttgaaagaatta

SEQ ID NO: 50812 - DNA, 201 bp, Homo sapiens
tcatttaaccctcagctgtagatgagaacaggatgcagcaaatttactgcaaaccagaaaataaaattggcttttctatccaagaaggaaataaagaaaamtctgccttatcttactttataaagataattcttttgttttccctgaaataaataataatcatttaaaagcattgggagaggtgtgcagtgactcaggccc

SEQ ID NO: 50813 - DNA, 201 bp, Homo sapiens
agtccgatgcaggaggatcacttgagctcaggagttggagactagcctgggcagtatagggagacctgactctttaaaaaaaatgtttttttaattagccrggtatggtggtgcatgcctatagtccctgctactcaggaggctgaggcaggagaatttcttgagcctgggaggttgaagctgcagtgagctgtgatcatg

SEQ ID NO: 50814 - DNA, 201 bp, Homo sapiens
gaggatcacttgagctcaggagttggagactagcctgggcagtatagggagacctgactctttaaaaaaaatgtttttttaattagccaggtatggtggtrcatgcctatagtccctgctactcaggaggctgaggcaggagaatttcttgagcctgggaggttgaagctgcagtgagctgtgatcatgccactgtattcc

SEQ ID NO: 50815 - DNA, 201 bp, Homo sapiens
cttctgtagcagccctggcaaactaatgcaccttccagtcttagaatggatcatcaaaaaggaggtttggcagtgcgggaatgacctgctcactgttcaargtcaccttgatgtcacctggccctctgctttacagccaagatggtcaatagttgatccaattacgacttttttcttctagttcaggaccttgagaagtct

SEQ ID NO: 50816 - DNA, 201 bp, Homo sapiens
actaaaataagtgaatgtacagaacgctatgtttaacgcaggcataaaaaagagaatattgaagaaaataagagtgggcaattgaaggctgcttttccatrcatttcttgaggtcagaaaacatgtgttttcctgcccagaccatcctcaggaactggcccggggtttgagaacatagtggatgagctgttcagggggcag

SEQ ID NO: 50817 - DNA, 201 bp, Homo sapiens
aggcctcactctaatcagcaccacatggaaaaaataaagcttcagcccaagccctataataatctaaaaacacagagctgcccaagtcccaagtgatgttrcaaatgtcctataataaaaatagctactctgcacagttcctcaccattttccaaagcttctgtgtccacacatcatttctgttcactcccgtatccctcc

SEQ ID NO: 50818 - DNA, 201 bp, Homo sapiens
cactggttctcaacattggctgtctgttggaatggtctgagaagttttaacagtttccaatgcctgggtctcactcccagagattctgatttacttggtcygggatgaggccctaggcatgagatcttcaatgcccctaggagaaaattttcatgggcagtcccaacaacctgtgcgataacctggcccaaaaacaaatca

SEQ ID NO: 50819 - DNA, 201 bp, Homo sapiens
ctatgactccagtccacaagggtcctgggtgcaaattgggacagaaaacaaattttcttagaattcagctggtgttctgaattcttaagataatagtgacyactgcacttgacaaatgattagtgatgttttataatatctataatgattgccactcagttacagtctttggttgttggcttgtgaatttccttcttgaaa

SEQ ID NO: 50820 - DNA, 201 bp, Homo sapiens
tgaatttccttcttgaaacttttcaagaagccctagactacaggaaagaaaagagagctcaaattcaacacagaactcagagccagggtctctcttcctgktatcattctctgcttcctgcaactgtgcttctcaaagactcccaaagcccctctggctcaactctagaaggaaagcccgattctgggcctggctgcttgt

SEQ ID NO: 50821 - DNA, 201 bp, Homo sapiens
accttgaggttctggatgaatatttcagagtcctccagagaggtggccagaaaacctgcaaaacaaagctgcagtttccccaactgcttttcctagagccygtgagccgggaaaaaactgaatgcccttgaaacagaaggccaagagactctctgcctgttgttgttgttcttatcagattcaaattcaacatacataaac

SEQ ID NO: 50822 - DNA, 201 bp, Homo sapiens
aaaaactgaatgcccttgaaacagaaggccaagagactctctgcctgttgttgttgttcttatcagattcaaattcaacatacataaacaatttagacccscactgtccagtacagacgcaaccagccacaagtggttatataataacatattagattagttaaaattgaataaaataaattgaacattcatttcagcact

SEQ ID NO: 50823 - DNA, 201 bp, Homo sapiens
attcaaattcaacatacataaacaatttagacccgcactgtccagtacagacgcaaccagccacaagtggttatataataacatattagattagttaaaaytgaataaaataaattgaacattcatttcagcactcacatgatctatgtttcaattgctcattagccacatgtagccagtggctaccatactagagattat

SEQ ID NO: 50824 - DNA, 201 bp, Homo sapiens
accaaccccaccatcactggatccccatagctgatggacactccatacatgattcagcatcagtatccgggggtgggagaggggaatacagcagtactccrtgaaaccgtttaagtctatatttgtaaagttcctccagagagtattaatgaactgcactgtatgtttcagcaagccctcccaggttcatggccttggttc

SEQ ID NO: 50825 - DNA, 201 bp, Homo sapiens
caaaatgcaattaaaatgtgtaaataatgctgcttacaacacctccatagctaagtgtggtataaataaaagtggtatggcactagcacattaaaaaaggrggcttgaaatatcaacatttaatgtaaaaaaagtacaagtacagtaatggaaagctgaatgtttaaagatttggaaactcttggaagcatgcttgtgttg

SEQ ID NO: 50826 - DNA, 201 bp, Homo sapiens
agaccctggatctgttttctgtacctatagttttctctatgataataacaaaataataataattttgttaatgttcagagcatgagtgagctccacctgamaactcttataatgtcaaatgatactgacgtcaacaaaacaacttagacaattcttgaaatttgcttatttatctgatacatttgttgagagtctattatg

SEQ ID NO: 50827 - DNA, 201 bp, Homo sapiens
agagtatttccttcccaagaaaccagtgtcccataattcacctgctggaacccctgtgcacaaagggattgtgtgattaatgtagattttggtgtttcatmttgtagcaacttaataaggtatgtgcccagcttctaaatgaaggctataatcacttttccatagtttatgaattatgaagttggattcccatcccaaatg

SEQ ID NO: 50828 - DNA, 201 bp, Homo sapiens
gtgcgtaccaccatgcctggttaatattttttatactttttgtagacatggagtcttgccatgttgcccaggctgagtcaaggtcagttttgtcaccatgsggggcatagagagacctcagcagtgaaggcctctaggaaatgggagaaatccaaccaggctggaacaaggctgggagaatcggccagttctagggcagtt

SEQ ID NO: 50829 - DNA, 201 bp, Homo sapiens
agcacactaatccagcactccagggaggactagaaacgtttaaagtctcccagcgctttccctttactgcgcctctggctgtacggacctaatgagatgcyttgtgtttttcagaatgccgaagcaagttacgacttcagcagcaacgacccctatccttaccctcggtacacagatgactggtttaacaggtaaactggg

SEQ ID NO: 50830 - DNA, 201 bp, Homo sapiens
aaaaaataggaaaatttccagggtcaaaaacagcctcatttcaaaaccaagtctgtttgacttgaatgtctctcttccttcccctacatcaagctggtacytgcagacgtatttgtctagggcagcccagccagggaagcccattgatcacagaggcattaaattccagatttgaaggtatggatggcagtgccagggcca

SEQ ID NO: 50831 - DNA, 201 bp, Homo sapiens
acaatgggagaacactgtgtcactagaaaattatatgaccctggcaaccttaggagtatggaagaaagatttcaaacaagtttctgactatgtatcttttyctaaatttttttgaatgctgaagaaatgttaaatttcattaagttttacagccagatttaatatagacataaatccctttaatgttcgtttcagtcaaaa

SEQ ID NO: 50832 - DNA, 201 bp, Homo sapiens
ccccctaagatttccaccctctgctgtaagcactctgtatagtccctctcttgagtatggcaggacctgtgaatatgatgagatatcactcttacaattargttattagattgcattatatggcagagttagagatttttttcagatgtcatcaaggcgcctaatcagttgactttaagctaatcaaaggaaagactatcc

SEQ ID NO: 50833 - DNA, 201 bp, Homo sapiens
ttgaccttcggattttaggacctaagactcaacatttgccttttataacatccatgcaacccacccctgcctgttatgtgacgcattccccctctcaggcytaagtttatagctctctggctataaattcctaagcatggggtctaccccaaatgctggcatcactaagaacaaatgggacaagaaaacccaccctttact

SEQ ID NO: 50834 - DNA, 201 bp, Homo sapiens
ctaagaggggaaaacatgaatctgtaggcacatgagctggaccatattttgaacacaaatagtgaagccaagagacccaagtgaaacagtttctgacctascctcccatctgtggccaaattcattttctagataacatgccaagaggtcagcgggtgtaaaccattcatgagtgatgcaagttgagagttacttgacagc

SEQ ID NO: 50835 - DNA, 201 bp, Homo sapiens
ccatgattgtgaagcctacctaaccatgcggaactgtaagtccaataaacctctttctgttgtaaattgcccagtctcacgtatgtctttatcagcaatgygaaaacaaactaatacaacagtacaatatgacagtagagaattgttcctacctgattaatgtaccattactgcatttaaaatgtttgcaatgaatgcagc

SEQ ID NO: 50836 - DNA, 201 bp, Homo sapiens
gctgtattttaaattgtgattttcagtggtatataccctatttctctccagattacacatcccacacaattgaagagaaatcaacagaaaaattagatctktctccagtagtccaaagaatattcaaaggtttgggggactctcctacggctgcttctggcttgctctgtacccccagtggtaggttttccttggcatgat

SEQ ID NO: 50837 - DNA, 201 bp, Homo sapiens
ccatttgggggaggttacacaaaaataagtatgcctgttggccacaatatgttattaaatagtattgtggtcctcagcatttctcaaactattgatgatgyttcctacattacagcgtatgttttcacaactcttttgaaattatagactttggctctgaggtatctaatccaacagtctcttttcacagatagaaagata

SEQ ID NO: 50838 - DNA, 201 bp, Homo sapiens
gaggtttggtccagtgcagcacactaatccagcactccagggaggactagaaacgtttaaagtctcccagcgctttccctttactgcgcctctggctgtayggacctaatgagatgccttgtgtttttcagaatgccgaagcaagttacgacttcagcagcaacgacccctatccttaccctcggtacacagatgactggt

SEQ ID NO: 50839 - DNA, 201 bp, Homo sapiens
gttttattctactttgttttgtttcaggcttgactaccaccagcaaaataatccccatgcttcattaaattatattgtgatttttcttcttagtggttacrttctctaaagtgaaatttttaatattacaatcttcctctagaataatcttttgactgttttgttctgctaacttgaaattatttgctactttaatccatt

SEQ ID NO: 50840 - DNA, 201 bp, Homo sapiens
cagcattttgggaggctgttgtgggcagatcccttgaggtcaggagtttgggaccagcctggccaacatggtgaaactccgtcatctctactaaaaaaaawaaataaagaaaaataaaaattggctgggcacagtgctatgtgcctgtaatcccagctacttgggaggctgaggcaggagaatatcttgaagctgggaggc

SEQ ID NO: 50841 - DNA, 201 bp, Homo sapiens
aggattcataacttcatcctaggagcaaagggaagcttcagggtggcagggagggggaataacatgcctagatttggcatttttcaaagatttgcctgctraagagacagattgggagtgaacaagaaaggaggcagggagagcagatgggggcttttctaggagaaagattatttgccaaagagctgttatggttaaaag

SEQ ID NO: 50842 - DNA, 201 bp, Homo sapiens
atttaccttttgttcctttttaccttttgtatcttttgtttaaaaaggtaaaattcttcaattttactgcttatcttgtgtttttttcctctccgtcttayggatttgggctcctattttgttacaatcttgatgtacatcctaattaatacaccaaggaatttcttctggttcttacgcttagttattttgcagtgcagt

SEQ ID NO: 50843 - DNA, 201 bp, Homo sapiens
ggactctgagacaaaggatttatttgtacccacctgagacgtgctcagagagggactggaggtgcatggagagggctcctgtcagaatcttcaatccgggrgaggccagctgcctgggatgtggggctgcctgccctcagtccctatgcagcctccctttgggctccttccagcctcactccactgtgatcttactcttct

SEQ ID NO: 50844 - DNA, 201 bp, Homo sapiens
tggctatgtaacaaaccattaagacataatagattaccacaaaaagtatttattagttcactataatctgggtcaggcatttaggatgagttccgctaggyggatcttctgcttgtcttgcctggggttcctcacgcagaggcaatcagctgatggtgtcagtaggagccgattggtcttgaacggcctcactcacatttc

SEQ ID NO: 50845 - DNA, 201 bp, Homo sapiens
aacagttgttcagttcttagggggtacatcatagtttgaatcccactatggacagtaagctcagccctagaataatggataaccatggacaacacaagctrcttcatactgttttcctgcttatggggaagagtggatcctggaattacagaagagaattgagcattatccgtggagaacaaatgcttaggaatggcatag

SEQ ID NO: 50846 - DNA, 201 bp, Homo sapiens
ctaatgttaccacaagtccttttatcagaacttcaattacaaattcatttttattcatcttttcagtagctaggttttactgaaacatgaagaaattagcytaagcatgaaaaaggagctgtctcagtttcagattaaaggggaaaaaattggcaggggaagtcctgtttttaggtcacagaggagaatgtggtgataata

SEQ ID NO: 50847 - DNA, 201 bp, Homo sapiens
gctgaaggttgcagtgagctgagatcacaccactgcactccagcccgggcaacagagtgggaccctgtctcaaaagacaaaaaaaaaaaaaaaaaaaaagrgagagataagtaacttactcaggctcacacagccagtgtgggaactaaacccaggtctgattgatcaaccccaaagcccttgccctttccgccacctgaa

SEQ ID NO: 50848 - DNA, 201 bp, Homo sapiens
cagtaaaaaaaaattacacaaaatgtaatttttactaattttaattacaaaatgtaattaaaactaagtcttccttccaccctagaccccacgcctctccscaggcaaagtactgtaaaaagacccttgtgcttcttctcagaactactctatacttaccatcaagtccatccctctcttctgtgcaaatgggagcccact

SEQ ID NO: 50849 - DNA, 201 bp, Homo sapiens
ttttatatgtgactggattcagtttgctactattttgatgagcatttttttgccatatttgtaagggatcacaatctgtagttttcttttcttgtggtatytctgtcttttcttcatgtcagggtgacacaggcctcaatgaattagttgggaagtgattcttcctcttccattttttggaagagtttctgaaggactgga

SEQ ID NO: 50850 - DNA, 201 bp, Homo sapiens
gttggaatggtctgagaagttttaacagtttccaatgcctgggtctcactcccagagattctgatttacttggtctgggatgaggccctaggcatgagatyttcaatgcccctaggagaaaattttcatgggcagtcccaacaacctgtgcgataacctggcccaaaaacaaatcatgatttgcaatttgaaaaacataga

SEQ ID NO: 50851 - DNA, 201 bp, Homo sapiens
tggatcacgaggtcaggagattgagaccatactggctaacacggtgaaaccccgtctctactaaaaatacaagaaattagccgggcgtggtggcatgtgcytgtagtcccagatactcaggaggctgaggcaggagaatcgcttgaacccaggaggcggaggttgcagtgagctgagattgcaccactgcactccagcctg

SEQ ID NO: 50852 - DNA, 201 bp, Homo sapiens
ggatttctgcagagactctcagagcagccctaagagggggccaggccaggtgggtttggtcctattcaccttcctttttaaaccaaagcacacagatttayacactgggcttcgggatgagatcacctttgattgaagattttgaaaaatatttaaaaaccacactgttgaccattgtgaaaatgccgtgaaatttctcta

SEQ ID NO: 50853 - DNA, 201 bp, Homo sapiens
catacaatgtgcctgggttcaggtcagatcaggcaggtactggaacttgggttcaggtcaggcaggccctggaacttgggccagttgctcttacctgtccmtgaactcaagcacttccacacctgcattccctccagactcaggttctttcttctgagaagaaaccttacattttttttgggggggggggttgtgtttttg

SEQ ID NO: 50854 - DNA, 201 bp, Homo sapiens
accagcattttatttggaatttggtgccaggaagcacaggtaggggagcaggggagtgaaaaagtgaaggaagtcaatacagggtgtgcacaagtgtgtcytactgtgggcaacaggagctcagttctgctaagcacccctagaacatgagttagaacacatgaaggagaaagagtacaagtatgaacacaccaactctta

SEQ ID NO: 50855 - DNA, 201 bp, Homo sapiens
tggccctgtaaccccaacactttgggaggccaaggtgtgtggattgcttgagcccaggagttcaagaccagcctgggcaacagagcaagacctctgttgcstttttttttttaacttgctcactttcctatctccttatgtctaatttttcccctacattgtctaatagtttcctaaattttttcagtatggtcaaacgca

SEQ ID NO: 50856 - DNA, 201 bp, Homo sapiens
tcactgcatatatatatatatatatatggcttcaaatctagatagttgtgtattcatagtatgttcacaacatgttcaattcatctggcccattctctcayttcacacctgaagaagcagagacccagaaaggttaaataacttgcccaagtaacacagcttgtcagtgttacttaccagctcaagtcacttgtgcctgga

SEQ ID NO: 50857 - DNA, 201 bp, Homo sapiens
gatctctaggtttcttaagcaagaggccactttctttaacatgacctggaagagctggcatgatctggcacctacctacctattcttatcagggttcttargtttaacaacagaagtagaatctgggtaactaatgcagaaaatgaatttattacaagggcatctctcacagaatcagattagcaagatgggaaccaggct

SEQ ID NO: 50858 - DNA, 201 bp, Homo sapiens
ccccaagatgcaaaaggaaatgcatttatatatccaatgtgtatatatataatatatatatatatatatataatgcatttatatagcctctattatatctwctaaaaatgattatatgtgtatgcttattaaattcataatgtaactctcttatttagttgttggctagaaaaccagcattcattcagcaaatagttatca

SEQ ID NO: 50859 - DNA, 201 bp, Homo sapiens
tagtataatgaattgttacctagttaattcaaaaagcaaaagaaaacacaagaatcacatggaccaaaaagtccaacatttgtgggagtggggggctcacrcaatgaagatgccctcctggctcgggcaggatcctaaggcatccgtggcaccccagcctgccttacccacccacagtgcccggaagtggagcacaagtgc

SEQ ID NO: 50860 - DNA, 201 bp, Homo sapiens
tgcatggcccaaccccttcattccataatcgcagtgggtggaaagactcaggtcagcttcactagcactctaagctccatgccacagaattgtgaacccaytgacccatccagatgacaaagcctggagagaggcatgtgaccccgtcagcgaagttttgagggtagtgatggagagacagcacacccaacccaatggcgg

SEQ ID NO: 50861 - DNA, 201 bp, Homo sapiens
tgctgtgaaaatagaaaataaaatgcactataggggacactcaaagaagtaaaatgttccccttggttgggagactgagttcaatagcaacacatctctcytaggttttcctgacactttaaaccatcatctcataccctctgcatttactcattgttttcctttattaaactccacgccaagggtgctttaggaaaacaa

SEQ ID NO: 50862 - DNA, 201 bp, Homo sapiens
ctgccccttttcccactcgcagtcctggcaaccacagatctgctttttattcctacagttttgtctcttctagaatgttatacaaatggaatcatacagtmtacagcctttgagtctggctttttcaagcatttattctttatcaatgtggttgcatatatcaataacatgttcttttttattgttgcgtagcattccctt

SEQ ID NO: 50863 - DNA, 201 bp, Homo sapiens
agctctgtgagcacaccccagaaatgcctcagatcctctaccctccccaggaagataacagtgacaaggatgaccaggccagggcccagaggtaacttctrtcttcagccctaatcctgtgtcccatatggatgcgtcctcaagcccatccatgggtgttagagctaaagtgttttaacctaccaagaaaaaaaaaatcct

SEQ ID NO: 50864 - DNA, 201 bp, Homo sapiens
cacacctgtaaaggagcagctggggctggggtaccatcattagcctgtggccatggaaacagagtcaaggtaactgacccacaggaccaagacacatgacyttgatgctattagctctttccattgaagcttgctggccatatacagcataattgaatgaaactgcagaacttcttcagtcagatccacctgtgccttcca

SEQ ID NO: 50865 - DNA, 201 bp, Homo sapiens
tttagtagagatggggtttcatcatgttagtcagactggtcttgaactcctgaccttttgatccacccatgtcggcctcccaaagtgctgagattaccagygtgagccaccgtgcccagctaaccttatgtttttaaaattgttgttgttggttttgttttcaagtgaactttttgcctgttctgtcaggatcatttcagg

SEQ ID NO: 50866 - DNA, 201 bp, Homo sapiens
ttggaaggctgaggcaggtggatcacctgaggtcaggagtttgagaccagcttggtcaacatggcgaaaccctgtctctactaaaattacaaaaattagcygggcatggtggcacgtgcctgtaatcccagctaattcaggaggctgaggcaggagaatcgcttgaacctgggaggcggaggttgccatgagccaagatca

SEQ ID NO: 50867 - DNA, 201 bp, Homo sapiens
tatatatccccttttacgtgggctactaggaagctcagataaaatctagggcaaaagagaggcatatggatgctaagtttatccttagtttcatcttaatyttcttgggaacaaagcataggttaaataaaaggagtaggctgggggcagtgactcatgcctgtaatcctttggaaggctgaggcaggtggatcacctgag

SEQ ID NO: 50868 - DNA, 201 bp, Homo sapiens
acttaacaagtccctggcatgtagtaagtgctatggaaatgcttgctgtgatagtcaacctttgttttctgcacttcttcctctaacgggttatggtttaratgtgagccatagttgttctgtctcgatttctgcctagctcctgttcaggtgaagctgagaggcagaaatggatcaagccttaagcagatgcccaagatc

SEQ ID NO: 50869 - DNA, 201 bp, Homo sapiens
agagaggttcaaagccttatttagcacttccttagcttttttttttttaagtttgttgaatttcttcccttttttttttttttttttttttttttttttgkgacggagtctcactgtcgcctaggctggagtgcagtggcgcgatctcggctcactgcgggctccgccccctggggttcacgccattctcttgcctcagcc

SEQ ID NO: 50870 - DNA, 201 bp, Homo sapiens
cttccgtctccaggatttctaggcaagaaatttctgttgtttaagccactcagtttgtggtcctttggttgttactttggtcctttggttgtggtccttckgtagcagccctggcaaactaatgcaccttccagtcttagaatggatcatcaaaaaggaggtttggcagtgcgggaatgacctgctcactgttcaaggtca

SEQ ID NO: 50871 - DNA, 201 bp, Homo sapiens
ctggggatgcatctacaagcccaggagagccagagatggccaacagcccaccgggagctgggaaaggaatgggatagattccttctccagaacttctaggratggaattgaatctattatgtctccagaacttctagagatggattctattcctagaagttctggagacggaagtgtcagcagggttggctgacacttccg

SEQ ID NO: 50872 - DNA, 201 bp, Homo sapiens
gctggggatgcatctacaagcccaggagagccagagatggccaacagcccaccgggagctgggaaaggaatgggatagattccttctccagaacttctagraatggaattgaatctattatgtctccagaacttctagagatggattctattcctagaagttctggagacggaagtgtcagcagggttggctgacacttcc

SEQ ID NO: 50873 - DNA, 201 bp, Homo sapiens
tctccacagtgagaatcagtcataggagatggggattgaaaatgtttaaaaggtaagcacccaaagaactgacatggatagatctaaaggtagcgctcctractcaaacagcgttcctacttcagagctggatggactcttccagcccactccttgtgggctgtgctgatcacacttccttcataaagtatgtaaaagaat

SEQ ID NO: 50874 - DNA, 201 bp, Homo sapiens
ccacagtgagaatcagtcataggagatggggattgaaaatgtttaaaaggtaagcacccaaagaactgacatggatagatctaaaggtagcgctcctgacycaaacagcgttcctacttcagagctggatggactcttccagcccactccttgtgggctgtgctgatcacacttccttcataaagtatgtaaaagaatgtt

SEQ ID NO: 50875 - DNA, 201 bp, Homo sapiens
ccccgtacagtttacactttcatgagtgtcaccttcattttacccagaagttaaataactttctgaggtcacagccaagaagaacctgagtcatgaaccayctattaaacccaggccttctgtctactaactcactgctttttccattctcagctgcaatccacctgacaagtaaagaatacttcatgaaaattgaaagta

SEQ ID NO: 50876 - DNA, 201 bp, Homo sapiens
gtcaccttcattttacccagaagttaaataactttctgaggtcacagccaagaagaacctgagtcatgaaccatctattaaacccaggccttctgtctacwaactcactgctttttccattctcagctgcaatccacctgacaagtaaagaatacttcatgaaaattgaaagtataattaaagaatctcaagttgaatttt

SEQ ID NO: 50877 - DNA, 201 bp, Homo sapiens
tatgttctagggtaagacttttcttcattgttcatggccttgtataaagaatggttaggattggggatcttagggagttaggcttaagagtggtggcttakactccattatcccagttaactgatgaaccatttgccatgaacacctttggtaggtcatgctccatttagcaactgggcagggaatccgatcacctcaaac

SEQ ID NO: 50878 - DNA, 201 bp, Homo sapiens
cccaaccttccccaagatgcaaaaggaaatgcatttatatatccaatgtgtatatatataatatatatatatatatatataatgcatttatatagcctctrttatatcttctaaaaatgattatatgtgtatgcttattaaattcataatgtaactctcttatttagttgttggctagaaaaccagcattcattcagcaaa

SEQ ID NO: 50879 - DNA, 201 bp, Homo sapiens
ctaatggtgggctagcaaacctttaggacttcctgggaaaatcttagatgtttgaagggcaaaattctcctgatctgcctcacctgattccctccccaacyttccccaagatgcaaaaggaaatgcatttatatatccaatgtgtatatatataatatatatatatatatatataatgcatttatatagcctctattatat

SEQ ID NO: 50880 - DNA, 201 bp, Homo sapiens
acttttgtacaaaaaaaaaagtcacaataaataaatttggaagacaagccacagactagaagacgtgcagcaaattttatggaaaaaaaggcttaatatasaaaatttgtaaagaacagctacaaatcaatgaaaaataaataaatacccttgtagaagaaatgggccaaggttattaacaggaaattcacagaaaagaaa

SEQ ID NO: 50881 - DNA, 201 bp, Homo sapiens
ttgtcagaaacagaactaaggagtcaattgaaacaatcataggaccagtagccaggaaaggaagagaggtaaaaaaaaaaaaaaaaaaaaaaaaaaaaaargacgaaaaaatatctccacatcaaaattatcctaaaatccactattccaaaatgcctgaaaaaaatacacctaaaaaaactaaaaatcaggatattaatt

SEQ ID NO: 50882 - DNA, 201 bp, Homo sapiens
tggcagactgggggagggatagcattaggagaaatacctcatgtaaatgacaagttggtgggtgcagcaaatcaacatggcacatgtatacctatgtaacwaacctgcacgttgtgcacgtgtaccctagaacttaaagtataaaaaaaagaaaatttaagaaaaactaaaaacactaaggaaatgtcttctctcttaaat

SEQ ID NO: 50883 - DNA, 201 bp, Homo sapiens
cagggggtgtggcagactgggggagggatagcattaggagaaatacctcatgtaaatgacaagttggtgggtgcagcaaatcaacatggcacatgtatacmtatgtaacaaacctgcacgttgtgcacgtgtaccctagaacttaaagtataaaaaaaagaaaatttaagaaaaactaaaaacactaaggaaatgtcttct

SEQ ID NO: 50884 - DNA, 201 bp, Homo sapiens
cgcagaagatgggcaatttctgcatttccaactgaggtatctggttcatctcattgggactagttggacagtgggtgcaaggggtcggaggatttcccttycctagccaaaggaagccgtgacagactgtacctggaaaaatgggacacttctgcccaaatactgtgcttttcccatggtcttagcaaacagcagaccagg

SEQ ID NO: 50885 - DNA, 201 bp, Homo sapiens
ggcaatgtgctataaaaatactccttaaaaaaactaaaaggttccactccaagatggccaaataggaacagctctggtctgcagctcccagcatgatcgaygcagaagatgggcaatttctgcatttccaactgaggtatctggttcatctcattgggactagttggacagtgggtgcaaggggtcggaggatttcccttt

SEQ ID NO: 50886 - DNA, 201 bp, Homo sapiens
ttgatgtaagcacaaaaatataaccaatggaaagattatcccccaatctcattttctgaacccaaacaaaatctaccctagtcaaatcttcctgggcaatrtgctataaaaatactccttaaaaaaactaaaaggttccactccaagatggccaaataggaacagctctggtctgcagctcccagcatgatcgacgcagaa

SEQ ID NO: 50887 - DNA, 201 bp, Homo sapiens
aacagagacagtgggaccccatctctacaaaaataaaaatttaaacattagctatgtatggtgacatatgggtgcctgtagtcccagctactcaggagackgaggtaagaggattagttgagtccaggagatcaaggctgcagtgagctatgattacaccactgcactccagcctgagtgacagagtgataccatgtgaaa

SEQ ID NO: 50888 - DNA, 201 bp, Homo sapiens
agagatcattaagagagacttcataaataaaagactgaattatggatggatggacggatggatggatggatggatggatggatggatggatggatggatgrttggatggatggatggttagatggatggatagatggatggatagttggatggaacggatggatgaaaagatgggaggatgctaatgagactattgggatt

SEQ ID NO: 50889 - DNA, 201 bp, Homo sapiens
aaataaaaataaaagattagtaaattaatgaaagtaacaaattcttcatacctgaaaatattcaagaggaagtttgatggccactggtgggatgttattgwagagatgacaatgtctatgctgaacttaaactagatgagacctaagaattgaacagaaaatgtgatttctgtgcaaaactgcgcatcttgataactttca

SEQ ID NO: 50890 - DNA, 201 bp, Homo sapiens
ttcatctgaaattggaatgtgaaacctccatattgagccgtgccagctcctctgagatctgcaataccagaatacacctgaagaactcttatcggttctgkgagtctcaagttcttttttcttcttttctttcttaagaacatttttctgattaaaaaataaatgcatgttatctgtcaaaaaatatgaaaaagcataaaa

SEQ ID NO: 50891 - DNA, 201 bp, Homo sapiens
cttttctgactctatgtcccaccttctggacacactggggtgggagctgggcctccaaggctcctaatgaccgctcccccatggcttcactgggcacagcycatgcagcagctctcatggggtggagtctcatgcctgccattctcccacactggaatcacatgttagtgggtctgtagttctggggtctcagggcagtcc

SEQ ID NO: 50892 - DNA, 201 bp, Homo sapiens
tggctgtagatgtttacaatgtgccttagtccgttcctgatgctgtaacaaaataccttagactaggtcatttataaataacagagatgtatttctcacayttctggaggctgggaaatcacaaattcagtatctgataaaggcttgctctctgcttccaagatggccccttgttgctccatcctgtggaggggacaaaca

SEQ ID NO: 50893 - DNA, 201 bp, Homo sapiens
agcaaatgtggtaaaatgttatatttagaaaatctgaatgaagagtatgtaggaattctaaatactcttttcccaatttttgtattgtttccaaattaaargtttacaaagaaaaagcaagtagatccaccatgacttgtgctccaaatgtatgcaactgattttgcagaatctcatgcttcatgctctatcctgttttgg

SEQ ID NO: 50894 - DNA, 201 bp, Homo sapiens
acatctctgtgatcctgtctttctattcgagaatatggccaatatctttccatgggatcaaatcttcatcttcgtccctccttccatagagttcagagagkttcaaagccttatttagcacttccttagcttttttttttttaagtttgttgaatttcttcccttttttttttttttttttttttttttttttgtgacgga

SEQ ID NO: 50895 - DNA, 201 bp, Homo sapiens
gccccgctgggctgcacatccatgatggtgcactcctatcgctggtggttgttgctggttgccactggagctcagctgggaccgtcaaaaagagtgcccayatattgtgctttactatagtttggtcttgatgtcttactcaccagagtggctataaactctatcctgccccaacaggactccaggggattggctgtagat

SEQ ID NO: 50896 - DNA, 201 bp, Homo sapiens
gtgagcaccactgctctagaagaacaccaagaaactgagctgtgcacagcattcaccattgctgacctgctagaaggttgatggttttcaccgtagcattygtaatcttggttgtatgcaccctgcctttattttactatatatgcaatatagtctttgaagtccctgtcctaccaagagaatcctaccttattttgggct

SEQ ID NO: 50897 - DNA, 201 bp, Homo sapiens
aaacagtaggaaggtccagcagggtgactgctccagttacttttgctgcataacagataatcctgtattagtccatcttcacattgctgataaagacatayccagactgggtaatttataaagaaaaagaggtttaatagactcacagttccatgtggctggggaggcctcacgatcatggcgggagatgaaaccgtgtct

SEQ ID NO: 50898 - DNA, 201 bp, Homo sapiens
gtactagaggaaactatttatttttacagaaacatactttgctttaaaaatagggcagaaatgaaaccttgcttaacaaaatgaaactacttgtatggacytaaacttacagctatagctgaaagcaaagaaaatatctggtcattctattatttttaattattcaattgactagtatttgtttcattgaacttagtcagc

SEQ ID NO: 50899 - DNA, 201 bp, Homo sapiens
aatgggaggctgaaaaggctcagcctccctccctttccatggagtctgaggacctctcctctcacatgaggcctccagcaaggtagatggatttcttatargtggctcaggactcccaagagtaggccttccaaaagagaagaagcagaagctgccagtcctcttaaaggctagacctggaatgggcaccggtaactctgc

SEQ ID NO: 50900 - DNA, 201 bp, Homo sapiens
tagaacttgtgaatatgttatgccacatggcaaggtggggttaaggttttagacgaaatgaaagttgttaataagctggctttgagacagggagattatcytgaattatctgaatggccccaatgtaatcacgagtatccttacaagaggaaggcagaagagaaagtcaaggtgatatcatacaagaaatatttcatccac

SEQ ID NO: 50901 - DNA, 201 bp, Homo sapiens
ccagactgaccaacatggagaagccctgtctctactaaaaatacaaaattagctgggtgtggtggcacatgcctgtaatcccagctactcaggagcctgargaaggagaatcgcttgaacctgggaggccaaggttgcagtgagccaagatcatgccattgccctccggcctgggcaacaagagcgaaactctgtctcaaa

SEQ ID NO: 50902 - DNA, 201 bp, Homo sapiens
gatcaggcaggtactggaacttgggttcaggtcaggcaggccctggaacttgggccagttgctcttacctgtccctgaactcaagcacttccacacctgcrttccctccagactcaggttctttcttctgagaagaaaccttacattttttttgggggggggggttgtgtttttgttttttgttttttgtttttttgagac

SEQ ID NO: 50903 - DNA, 201 bp, Homo sapiens
aatctctgacttcagggaaaataattgaccaaggcccccagctgctgcactctgaaatctgtcactgtgccaacaaggccacactccccccagtgactgcragcagcaggggaactcaggcaggcccatttctgggagacacagggctcctcaaatttaatccccaacagttttaccaaaccatccttagagtacagggga

SEQ ID NO: 50904 - DNA, 201 bp, Homo sapiens
aatgagggcagaatttgcatgaataacgttttggtactaaacactgtatttattaggatgaaccatttttatagggctttctaaaacacaattatatggayataaagatggacaatacaatcttatctccctttagccaaagagtattgacaatgcaatttgtgcaaagtttatgtgaattcctgtagttcctcagtcgtt

SEQ ID NO: 50905 - DNA, 201 bp, Homo sapiens
gtatggaaggctaaaattcagagaaggaggaagagagaataagtcagtgaccttttagtaataatgtgaaaatatagtttagacactcggaaatatttctytgacattaagggctttatcatacatggaattgtaacactgcagtctttcccagaggtcttctaaaatagtttataacccaatctgtccggtcatggtaat

SEQ ID NO: 50906 - DNA, 201 bp, Homo sapiens; identical to SEQ ID NO: 8720

SEQ ID NO: 50907 - DNA, 201 bp, Homo sapiens
cttttcagggagaactgtaggagagtgagggatttgggaggggcagaagtagccaagaaaggatgtggaaccaggtatgtgcatgtggcctgacccaccgsgggctttggagcatcaacgccaccacacagttgtcccgcttgggggcaggagcattggttttatgtattcttatttcagccaggtttccatagctcctga

SEQ ID NO: 50908 - DNA, 201 bp, Homo sapiens
aggctcattctctcattacactcaagataatgctgctactctcagaagccccaatagcctggagcctggcacttgttgttggctggcataggacccagcakgagcctcccaccagctgtgcagacaccaaggcatcccacaggttcttcaggtgttttctgggcataggcaccaaatccgatgccccatctctgttcagca

SEQ ID NO: 50909 - DNA, 201 bp, Homo sapiens
tggaaaacactcttcaggatattatccaggagaacttccccaacctagcaaggcaggccaacattcagattcaggaaatacagagaacaccacaaagataytcctcaagaagaggaactccaagacacatacttgtcagattcaccaaagttgaaatgaaggaaaaaatgttaagggtagccagagagaaaggtcgggtta

SEQ ID NO: 50910 - DNA, 201 bp, Homo sapiens
ttgaacttagtcagcattcaagaaagccgtattgttcccactgtgcaaaatgctatactaggggcctgaattatgaagtgtgaaaaatccagtccctgacyttggggggttcacatgtaagtatataattacattataatatgcttagtgctagcctggaaataaaacaccacccatataggaatgcaatagctagaaaaa

SEQ ID NO: 50911 - DNA, 201 bp, Homo sapiens
tctgagttttaattgcagctcaattcttaattgtgtgaccatgtacaattgagcttatgattcagtctccccatatgtaaaatgcagataataatagatarcaaaagtttttgcttattgttttcaaaaagaagccatagtagggagagaatttttcagtacccagaagctgcgacaagaatatagttaaaagcaattcca

SEQ ID NO: 50912 - DNA, 201 bp, Homo sapiens
agtcactcttatgttgttgataattaagaaataaaatcactctggaagttgttcttctctctccctttgctctgaagttgaaactcaggcctgtctattargtacctttagaattatcactgagatcattttaccttgcacacaatccagggaaatcagtaatcatctctgggcagatatcagtaatgtgcaaaacccatt

SEQ ID NO: 50913 - DNA, 201 bp, Homo sapiens
tagttaacttcttctcttgttttctatagctgctccaaagagcttggacctgactacagaccaaagtaacagagaatgctagcctcatctgtaattgatargatttttttttttgctagaatatctgagagtatttttacctcgtgttcaatctcatgagtttcttttcattccatatctcttatgatgtgccttctgtct

SEQ ID NO: 50914 - DNA, 201 bp, Homo sapiens
aggcaggagaatcgcttgaacccgggaggtggaggttgcagtgagccaagatcatgccactgcattccagcctggtgacagagcaagactccatcacagasaaaaaaaaaaaaaaagtcaaaaaatagtaaatgttggcgaggctgtggagaaaagagaacacttatacgctgttgatgagaaagtaaatcaattcagcca

SEQ ID NO: 50915 - DNA, 201 bp, Homo sapiens
atttagtaagcactcaataaataccaaaataaatactgagaaaaaaatttaaaggcttagcatcatcattagattttcactgcacacccagccgatgtctsatgagatggtgcaatcaggaaaaccaagtatgctaggaagggttataggaacatcctatttagtgcctgtgttaagtggatttccttaattgcccttaat

SEQ ID NO: 50916 - DNA, 201 bp, Homo sapiens
tttagtagagacggggtttcaccgtgttagccaggatggtctcgatctcctgacctcgtgatccacccgcctcggcctcccaaagtgctgggattacaggygtgagccgccgcgcccggcctgcagtcctcattttaaggcctgcgtattttatgcttctccagtgttttcctttttccctttctagtcttctgctggaat

SEQ ID NO: 50917 - DNA, 201 bp, Homo sapiens
caaatcaatatatgtgatcatcacataaagagaatgaaaaacaaaaaccatattatcctctcaataaatgcagaaaaaacttttaataaaatccatcatgmcttcaagaaaaaaaccctcaacaaactaggcattgaagaaacatacctcaaaataataataacagccagctatgacaaacccatagtcagcatcatactg

SEQ ID NO: 50918 - DNA, 201 bp, Homo sapiens
gctggagtgcagtggtgctatctcagctcactgcagcccctgcctcctgggttcacacgattctcctgcctcagcctcccgagtagctgggactacaggcrcgcagcattatgcctggctaatttttgtatttttagtagagacaaggtttcaccatgttggccaggctggtcttgaactcctggctttaaaggatccacc

SEQ ID NO: 50919 - DNA, 201 bp, Homo sapiens
aagaaagaggagagagaaaaaagaaagaaagaaagaaagaaagaaagaaagaaagaaagaaagaaaggagagagaaaaaagagaaagaaagaaagaaagaragaaagagaaagaaagaaagaaagaaagaggagagagaaaaaagagaaagaaagaaagagagaaaagagaaagaaagaagaaagaaagaaagaaaggaaa

SEQ ID NO: 50920 - DNA, 201 bp, Homo sapiens
caaaataaatactgagaaaaaaatttaaaggcttagcatcatcattagattttcactgcacacccagccgatgtctcatgagatggtgcaatcaggaaaascaagtatgctaggaagggttataggaacatcctatttagtgcctgtgttaagtggatttccttaattgcccttaatagcctaaaattttgtgacttaatc

SEQ ID NO: 50921 - DNA, 201 bp, Homo sapiens
aaatgctttttgcaatagttgttaggcacataaacatagtgtttgatctgctttccctcatgtataaaatgaagggttaaacgaatgtctttctaggatcmgttcgcgctgattacagacaaatgggagtgctccatgtaaacaagtccagaaagtttttgtgatagatttaatatatagtgcatgtgaggccgtgactgt

SEQ ID NO: 50922 - DNA, 201 bp, Homo sapiens
ttctgaaaaagtgcaccagtgtatgactgaagattagcaaaactatataaaagtcaaatcagaggtctgggaagagtaatgcaggggtttcaacagacagmgtaacaggggacataatgaagtcacaggcctaaaagaaaggatccaatgactttgcaaggggctagcaagaaagcttggagactaaagtagcaaaaagag

SEQ ID NO: 50923 - DNA, 201 bp, Homo sapiens
agtggagttgaaaatagggcactggatttgataagaaagagatcactgatgaagctgtcacctgaaatctgggagggacaccatcaagcacagctttctcwagggcaacagttctcaaattgtgtcccctgaaccagcagcaccagtgtcacttgggaattggttaggattttctaagaccctgctccagacttacggaat

SEQ ID NO: 50924 - DNA, 201 bp, Homo sapiens
ctgggcagtatagggagacctgactctttaaaaaaaatgtttttttaattagccaggtatggtggtgcatgcctatagtccctgctactcaggaggctgargcaggagaatttcttgagcctgggaggttgaagctgcagtgagctgtgatcatgccactgtattccagcctgggtgacaaagcaaaaacccatctcaaaa

SEQ ID NO: 50925 - DNA, 201 bp, Homo sapiens
tgtcactggatgatggcatcagtgatactaatggcttgattaattattgtccttgtagtcacactgaacggctggtagagcagccagttctatccatgaartttagtccagctaagaacaaaacaattaaatgcacctcccctgacatataaatatatgaatgcagaacaaatcccgtaacttagaagccaagaagaaaag

SEQ ID NO: 50926 - DNA, 201 bp, Homo sapiens
aacatggagaagccctgtctctactaaaaatacaaaattagctgggtgtggtggcacatgcctgtaatcccagctactcaggagcctgaagaaggagaatygcttgaacctgggaggccaaggttgcagtgagccaagatcatgccattgccctccggcctgggcaacaagagcgaaactctgtctcaaaaaaaaaaaaaa

SEQ ID NO: 50927 - DNA, 201 bp, Homo sapiens
gtgaaccactcagaattgcttttattattggagagaaggtaaaaataatgacagcaatggtggttcataatcttcaaagtatttttatgcccatcatctcrtgtgattaaaaaaaaaaaaacctctgaggttggcagaagtgtgcaaccttatttgataaatggtaactaagactcagaaaagtaaagtaattgggtcaaa

SEQ ID NO: 50928 - DNA, 201 bp, Homo sapiens
gaatttgggaagggcttgcggttcccacttgggatgccatatacttgcagtcagacggcagcggagattgggggggttgtctgaagactcaacagggctgsatgtccaagatgtcccatcacatggctacaggctgggagcccagctgaggatcaaccataggaccaaagctcagcctctccaggaccatagtctcagggg

SEQ ID NO: 50929 - DNA, 201 bp, Homo sapiens
ttgaacccgggaggtggaggttgcagtgagccaagatcatgccactgcattccagcctggtgacagagcaagactccatcacagaaaaaaaaaaaaaaaaagtcaaaaaatagtaaatgttggcgaggctgtggagaaaagagaacacttatacgctgttgatgagaaagtaaatcaattcagccactgtgaaaagcattt

SEQ ID NO: 50930 - DNA, 201 bp, Homo sapiens
ccagccagtgttttatccaggtgagctgacactcttgtgtcccacccactgtcctcaggcctgaccatttctgggagcagagattctgtgatttccaactrccaatacctgcaactcttcatcttaggcagttcccacttggccctggttcagggcagattggaagttctgagtagtgaatgctccccaccagagaagccc

SEQ ID NO: 50931 - DNA, 201 bp, Homo sapiens
ggaatttgggaagggcttgcggttcccacttgggatgccatatacttgcagtcagacggcagcggagattgggggggttgtctgaagactcaacagggctsgatgtccaagatgtcccatcacatggctacaggctgggagcccagctgaggatcaaccataggaccaaagctcagcctctccaggaccatagtctcaggg

SEQ ID NO: 50932 - DNA, 201 bp, Homo sapiens
agaaaggaaaccacagttttttggctcactattttgtggttcaggaatttgggaagggcttgcggttcccacttgggatgccatatacttgcagtcagacrgcagcggagattgggggggttgtctgaagactcaacagggctggatgtccaagatgtcccatcacatggctacaggctgggagcccagctgaggatcaac

SEQ ID NO: 50933 - DNA, 201 bp, Homo sapiens
gtaatcccagcactttgggaggccaagacgggcggatcacgagtcaggagattgagaccatcctggccaacactgtgaaaccctgtctccaaaaaaaaatrcaaaaaaaaattagctgggcgtggtggcacacgcctatagtcccagctactcgggtggctgaggcaggagaatcgcttgaacccgggaggtggaggttgc

SEQ ID NO: 50934 - DNA, 201 bp, Homo sapiens
atttctcccagcatactctccagattggggatctgaaagagcagtggagtgggcaatctacttttccagagaaggtctttatatagaaaacagttttgccwggagggagccagaaacctcctgatgtaggaataacgcctctcactagagtcatcagagtcactggaatgagaaattaccgggtaccacaggcacactgaa

SEQ ID NO: 50935 - DNA, 201 bp, Homo sapiens
aagcaatctataacgctcttgtttgtttctttgcttgtttgtttgtttgtgacagagtccttctctgtcacccagactggagtgcagtggcataatctccrtgcactgcaccctccaccccactgaggtcaaccaatcctcctacctcagcctccctggtagctgggactacaggcatgtatcaacatgcctggctaattt

SEQ ID NO: 50936 - DNA, 201 bp, Homo sapiens
ggagtagacagtttaaggagtggactacatactgtaaatgttcttgagtgataaggtgtgtgtcacacccagcaccagcaaattacacatacacacacacatacagcaaaattagcatcattcagaagttcttcccacacattccaagaaacattgttgagatggtgttattattccatgcttacttatttagaatgcatt

SEQ ID NO: 50937 - DNA, 201 bp, Homo sapiens
tggagtagacagtttaaggagtggactacatactgtaaatgttcttgagtgataaggtgtgtgtcacacccagcaccagcaaattacacatacacacacacatacagcaaaattagcatcattcagaagttcttcccacacattccaagaaacattgttgagatggtgttattattccatgcttacttatttagaatgcat

SEQ ID NO: 50938 - DNA, 201 bp, Homo sapiens
tctgttgacctgccaagtgtggcaatatttgcctggctgaatttcaattgatatattgtatatttattgggataatgttacatatatataaatatacatayatatatgtatgtatgtatatatatatatgtatatttgagactgagttttactcttgttgcccaggctggagtgcaatagcgcgatctcagctcaccgcaa

SEQ ID NO: 50939 - DNA, 201 bp, Homo sapiens
cagcagaatcacttgaacccaggagacagaggttgcagtgagccaagaccgcaccactgtactccagcctggaaggcagagcgggactgtctcaaaaatarataaataaaataaaagattgcagggtttaaattgaatctcttcctacccttactgcatatttctctgacattctgaacaaataagtgattaaaaaatgac

SEQ ID NO: 50940 - DNA, 201 bp, Homo sapiens
tatcatccctttaattcaacactatgctacatttcatagctgatcaaatagttataaatctaagaaaaggtgtgagatcattaagaagaaaattataaaayttacaaaagaataaaggagtcctaaataaatagagtggcatactaagctcagggataagaagatggaacaatataaagatatcatatcaaattaatatat

SEQ ID NO: 50941 - DNA, 201 bp, Homo sapiens
cttaaaaacattatgccaccacattaggcttacaaactcaagtgtgtcacaaaacttgtgtgttatcttatgataaagcacagttcctaaatatgtctcargacccataacatcaagaaatgccaaagctggaatgtgcctctaacccagtgtttcctggcccagtgtatactgtgaaccaagaagccatctggggtcttc

SEQ ID NO: 50942 - DNA, 201 bp, Homo sapiens
aagcctgtagctcagatgcctcacaggggcatttctgatctgcaacactatgtccctgttgtgagctgagtcccaggcctctctgaggttggacatcccakcgtgcctcttcccactccaacagcacacctcagaaggaagaggcagcctcaggggcccgctgagtggccactcgtgctggatttccacccacctcacctt

SEQ ID NO: 50943 - DNA, 201 bp, Homo sapiens
gacggtagtcctgattttgctatcatttaatacaacttaggtcttaatgttctcactcagtgctgagtgtgctgggataagcaaggtgttcacagtcttgyacatttttttctttactttttatcataaaaatgagctgcagatgtcatgcagtgcagagagaagagaatgctttctgagtcagaaggtcacattttttgt

SEQ ID NO: 50944 - DNA, 201 bp, Homo sapiens
cctcacagggaatgcttaaaatatcaatttaaatgcaaatgaatcttatcattccaaattagactcatcccattgtgttgaaattaatatagaaaataacwccgaacaccaaattacaagtaattaatattgacactgtgaaaagtatacactctcattttgatatttggggaagaaagtcttgtctgtgcgtgtgccatt

SEQ ID NO: 50945 - DNA, 201 bp, Homo sapiens
taatcctcagaaaaagtaaacaagttaatcatagttgttactatgctattagttgatagaaaatttttaaaaattactttccactaaatattgtgtacaaytaagtgaggggaagaaagttttaaaaaatgaaaagatattagctaattctcatcattttctccacatttatccttgcagcttatttgttcatatatttat

SEQ ID NO: 50946 - DNA, 201 bp, Homo sapiens
gctcagtcatgtttttctaatacaattcagtgcttccaaatttatttactgctgcctcaaaaacaccaagtaaatcatgcttttatacacgcacgcgatgyccatgttgagaagaaatttgctaagcggctgtgtttgttgaatcctgagcctgcctctgcacctagaacaatcccaccatgaaatgaaatgaatgcttgc

SEQ ID NO: 50947 - DNA, 201 bp, Homo sapiens
tgccccatgtggtctcccatcttccaggaggctagcccagcttggtgactatgtaggatcccaaggagagcagaggctcccaggcttcttgaggcctaacytgagaactcacacaccaccacttctgccaaactctatcacagagtaaatatcaaaggaaatcaaaggccagcccagatttaaagggaggggaaacagact

SEQ ID NO: 50948 - DNA, 201 bp, Homo sapiens
actctacaacaccccaggacaggatgaaacctgatagaacacctctatgactagtccgtgacttcattatttgccaaggtagtccacataaaagttcttcyttaagggaattccaaagctacttccttgtagcgttggttcataatccacattctcctttctgaggccaaattaatctatcttccatgtgagaacccttca

SEQ ID NO: 50949 - DNA, 201 bp, Homo sapiens
tcttcagtccctggtcaacatatcaaaacctcataaattctacaagtacctgaaaagcttccgaagagtagatttatttaagataatatttgcttcccagmtctgtcaaaccatacttgcacatctgaaatagaatattaaagtgaaatatattttaaaaacatgaaggactcataattctatgagtaacacacactagtc

SEQ ID NO: 50950 - DNA, 201 bp, Homo sapiens
aaggactttcacatgagattcttttgagctgatagaatctgaaaactcattcttgtggggcttttcatgtgaacatttccctgggtttaatttgggcttcwattaggaattcagataaaacagtctctcagcagattgccaaatgacaggccacaggcaattttttctttaacttctcaagagttcccaccttccctaaag

SEQ ID NO: 50951 - DNA, 201 bp, Homo sapiens
ccagcacatcactcttccttaggcacacagctagtgagtcagagaaaagccttcaggcagagacagtattttggggtttctaaaagcagcttcaagcttgkacaggagaatgcagaaggaatatgggaaaggctagagtccttctgccttaaccatcgccggagtactaactagaaagtcaggactagcttaaatgtataa

SEQ ID NO: 50952 - DNA, 201 bp, Homo sapiens
gtcactggatgatggcatcagtgatactaatggcttgattaattattgtccttgtagtcacactgaacggctggtagagcagccagttctatccatgaaawttagtccagctaagaacaaaacaattaaatgcacctcccctgacatataaatatatgaatgcagaacaaatcccgtaacttagaagccaagaagaaaaga

SEQ ID NO: 50953 - DNA, 201 bp, Homo sapiens
agaacagtggtgtatcaccatgatcctagctcacctaataggcacattactccctgatattccaaagaaataatgctcatttttaattttttctttctggratgatatatggaaatgttgcctgaggctagaaagaaagtttgtgagtgaggctgtatgtcagataaccactacctgtctcattatctgggtgtcattcta

SEQ ID NO: 50954 - DNA, 201 bp, Homo sapiens
cttctgagatgttaactgaattttgcggcagactgttggtgcatcctctgtatcagggagtctgcaaactatagccaaacccagtacgcggtctgcttttrtaaatacagttttgttggagacaactgtgcttgtttgttgttgtattgtctatggctgatttcatgctaccacaagagagctgagtagttacagcagagg

SEQ ID NO: 50955 - DNA, 201 bp, Homo sapiens
cctctgggaatggaatggcttcttgttcagtagttttgattattatagccctttatagcttatgagtcattgggtttactcaaaatgtccagctcctcatyctcatttttttctctatggcccagccatgcccgtcctgaaaaatttttaaaaaggaataataaaaataaataaataaaagtcatgtactctatatttcat

SEQ ID NO: 50956 - DNA, 201 bp, Homo sapiens
gcctgtagtatcagctactcaggaggctgaggtgggaggatagcttcagctcaggaggtagaagctgcagtgagccgtgatcacaccactgcactccaacytaggtgaagagcaagacactgtcccaaaaataaataaatataaacagagtctgttactaaaaatagatattggcggatataaggtccaaggtttgatctt

SEQ ID NO: 50957 - DNA, 201 bp, Homo sapiens
aacagtagctggaacacaaacattgagctcatgatccgtcgacatttcctcattggctttggccatttagcattgcaggcccagcccatgttgatttttttattcctttacaattaaaatgttttggttgtttttgttgttgttgtttctgcttgaaggcttctggaattttgtctctatcactgcaatttaaatattccc

SEQ ID NO: 50958 - DNA, 201 bp, Homo sapiens
tgagctattcatttctcatctattctatcaagtaggctcttgaaaccccaaagtcttaccctgtagagctcattggacattagccagcaaacgtggtcgaygccaaactagccaggaagtctctgcatttcagttctaatatgtctaacactggagcttctttctccaaagccaagggtgaaaagactgcagctggccacc

SEQ ID NO: 50959 - DNA, 201 bp, Homo sapiens
caacagtagctggaacacaaacattgagctcatgatccgtcgacatttcctcattggctttggccatttagcattgcaggcccagcccatgttgatttttttattcctttacaattaaaatgttttggttgtttttgttgttgttgtttctgcttgaaggcttctggaattttgtctctatcactgcaatttaaatattcc

SEQ ID NO: 50960 - DNA, 201 bp, Homo sapiens
tcatgtggttgtcggggaaaataactgagataatgtacatgagtactcagggcactgcccagcgcaacagtcagccctcagtaagtgtcagccatcactarggtttatccttattttacaggtgagcaaactgagtcttaaatgggctccacagcttgctggagaccccacagccagagaacaacaggtatagcagggcct

SEQ ID NO: 50961 - DNA, 201 bp, Homo sapiens
agatgtagataagatccactcaaatccccataatgtaccctgtagaagtcttaacccttcccaatattcctttaaattctaggagtggagctagattttcrttttacttctggatacagttttctacttctaccaaaactttccagttaataaattatgtctccttcctacccaaacaatcattcttcacaatggttactc

SEQ ID NO: 50962 - DNA, 201 bp, Homo sapiens
gcaacagtagctggaacacaaacattgagctcatgatccgtcgacatttcctcattggctttggccatttagcattgcaggcccagcccatgttgatttttttattcctttacaattaaaatgttttggttgtttttgttgttgttgtttctgcttgaaggcttctggaattttgtctctatcactgcaatttaaatattc

SEQ ID NO: 50963 - DNA, 201 bp, Homo sapiens
ggactatgagttctgcttttcatggcgtgtcttgagtacttcagtgagaaactcaagagcactaggcaaggagttagtatccagaagcctctttcagaaaratgattctggcagaaaactgtttttaagagggacagacacaagagtagaataaccacatgtgctctcaaaagtcagacttgtttacagaaaaatctatct

SEQ ID NO: 50964 - DNA, 201 bp, Homo sapiens
taatgagaatttctaaaaactctgcaagtctgacttagcagcattattatactgtcacccagcctgaatcttcaagctgacaatttgctgcgagttcttcrttcacttctttttctccttccttctggaaccatgcatattttgccttaagagaacaaagtgatgatataaaaaaggtgtggtgtgtgtgtgtgtgtgtgt

SEQ ID NO: 50965 - DNA, 201 bp, Homo sapiens
ttgcagcaacagtagctggaacacaaacattgagctcatgatccgtcgacatttcctcattggctttggccatttagcattgcaggcccagcccatgttgatttttttattcctttacaattaaaatgttttggttgtttttgttgttgttgtttctgcttgaaggcttctggaattttgtctctatcactgcaatttaaa

SEQ ID NO: 50966 - DNA, 201 bp, Homo sapiens
ccattgtcacgtcaattatagataagttcatgccaacataatacctcctcctcatcttatttctgtagctcaggataaaaagataatctccaaaggaggcytaaaaaacagccacattaattaaaggaaagagattttttttttctaggaagtgcctaataactaacggacaagcaaaggagactcattagtggaagtatt

SEQ ID NO: 50967 - DNA, 201 bp, Homo sapiens
attctctgcatccacaaagtgcagttagtggtgcttctctctcagtgtggtgacagcgatcagagcggattcttacgggggggcaatgagtccagggccayggatggccaaaaaatgttctttgcttcaaaaaaggtgatggctgactttggggcagagaaactggtggtaaagttaaggctggggagggccaataggaag

SEQ ID NO: 50968 - DNA, 201 bp, Homo sapiens
caccctaatggctttaattaatgacctctttaaagacactatcttcaaatgcaacctcattctgaggtactgggggtaaggacttcaacatttgaacttakagggaagagagtccagcccacaacaggcatgacccgtggctctgcccttggctaaccataggaccgttaaccagccacttggtgtcttcatgccttcact

SEQ ID NO: 50969 - DNA, 201 bp, Homo sapiens
gaaaattgtcctgtcaagtacaccccagtctaaccattcctgccgtaatatctggcatagagcctccatcttttaatatccttttccttaatataatttcytaaatccatctcctaacattgccccaccaccctggaaacaagcatagccctggctgcaatgcacatgttccaaccaatatagaagctgagatttcacttt

SEQ ID NO: 50970 - DNA, 201 bp, Homo sapiens
tggcgtgatctcggcttactacaatctccacctcctgggttcaagtgattctcctgcctcactctcccagagtagctgggattacaggtgcatgccaccaygcctggctaatttttgtattattagtagagatggggtttcactatgttggccaggctggtgtcaaactcctaaccttaggtgatccgcccacctcagcct

SEQ ID NO: 50971 - DNA, 201 bp, Homo sapiens
tgaatttccctgattatcaactgaagttaaacacctcttcatatgcttattgatgatttggatatcctcttttaaacacatttgtttcagatgctttgtcytgaaaagtttttcttttgggttgtccatcttcactttttatttgtaggatttctttacctatgatggatagaaatttttggtcagatatatgtattttga

SEQ ID NO: 50972 - DNA, 201 bp, Homo sapiens
tgtaaatttgtcctcgacccgtatttatgactctttctacttgggctggctaaaggccttgagtttcctgtgagtactataattttgctcaatagatgccyttaaacctccctggtaatttcttcctcaaaataataagctctcttgaggatcctacagacagaggaagaattcccgtcgtttatacatgattttaatgaa

SEQ ID NO: 50973 - DNA, 201 bp, Homo sapiens
atattccattgtacatatatatcattttgtttactgttttatcaattgatagcaatgtgggttgtttctagtttttgactatcatgaataatgttgctatraacatttgtatacaagaatttgtgtaaatgtatgttttcatttctcttatatgcacccgtacatggaattgctgggtcatatgacaagtctatatgttta

SEQ ID NO: 50974 - DNA, 201 bp, Homo sapiens
tttccaaaaggccccagttcttttttgttttgttttgttttgtttttcttgagatggagttcactctgtcacccaggctggagtccaatggcgtgatctcrgcttactacaatctccacctcctgggttcaagtgattctcctgcctcactctcccagagtagctgggattacaggtgcatgccaccacgcctggctaatt

SEQ ID NO: 50975 - DNA, 201 bp, Homo sapiens
gatagacataatgaaggacttccctacaacactggatattaaatgctgaaaaaggcttttcaattccttcctgaaataagccagggccataagcacttagsccactctatcgaagtctccccgagaaaaccctgcggctttctctgcggattcctccagcccaacaccgaggaaccagggcctgggacttctggagtccct

SEQ ID NO: 50976 - DNA, 201 bp, Homo sapiens
tgtagggatagtatttctctctctccctcattcagtatgtgcccatgtcaggcctaactgaacacagggaccaaataaatagaagatattccattcagatkttatagcctgactgctttactctgcaacctctattattgagaattatctattttgactgcaaacacgtcatttcatcaaaggttctttacaaagcagatg

SEQ ID NO: 50977 - DNA, 201 bp, Homo sapiens
atatataatatatattatatttaatataatatatattatatataatataatatatattatattatatataatatgatataatatatattatataatatatkaaaaatatatactttttttttgagatggagtctcactctgtcacccaagctggagtgcagtagtgccatctcagctcactgcaacctctgcctcccgagt

SEQ ID NO: 50978 - DNA, 201 bp, Homo sapiens
ggcttcaattaggaattcagataaaacagtctctcagcagattgccaaatgacaggccacaggcaattttttctttaacttctcaagagttcccaccttcyctaaagaggaatttctgctctaggaagccactttaactttacttttgcagtaacaattaagctgcctgtgctgccagccaaggccaagtattcttaaagg

SEQ ID NO: 50979 - DNA, 201 bp, Homo sapiens
cctggccaacatggtgaaacccagtgtctactaaaaattcaaaaattaaccaggcgtggtggtgcacacctgtaatcccagcttctcaggaggctgaggcrggagaattgcttgaactggggaggcagaggttgaagtgagctgagatcatgccattgcacttcagcctggtgacagagcaagactccatctcaaatatat

SEQ ID NO: 50980 - DNA, 201 bp, Homo sapiens
aatgagtaagcctggtttttttctagatgctgtttttttctagatgttcatttttaaatgatgggtactgttcgtgctgtcatgcttcctaaaggaaaagygggaactctctgggaggcatcatgctagcaaagccagagatctcttggaagttttaactttctttgggagaattcttacaagccctggtatagagaaaag

SEQ ID NO: 50981 - DNA, 201 bp, Homo sapiens
aatgggatatcaccttatattagagattggagatcaccttttatttggatttttatttatataaaaatacatatattatgaccaggcacggtggctcacgyctgtaatcccaacactttgggagtccaaggcaggcagatcatgaggccaggagttcgagaccagcctggccaacatggtgaaacccagtgtctactaaaa

SEQ ID NO: 50982 - DNA, 201 bp, Homo sapiens
accttaggccaattacgtgcacgttgacaaagatggatgtgtcttcattatgtagtttattatggatagatcagggctgggacaagaacctacatcttgtratcctagtacagtacatttttaggaagcacaacccccatagatgaccctacaaggagcctatactggagtgaaataggaggctgtgagttttacaagaca

SEQ ID NO: 50983 - DNA, 201 bp, Homo sapiens
ccatttcgttagtcatttttggtaatttacatgttccttgaacgtacttattcacctcaattatgaaatttgttgttgtaaacttgtataaagtattttcytttttttttttttttttttttttgagacggagtcccgctgtttagcccaggccggattgcagtggcgcgatctcggctcactgcaagctccgcctcccgg

SEQ ID NO: 50984 - DNA, 201 bp, Homo sapiens
atatctcacacatttttcttgctgttgttttggctacaacctccagactaatgaataatagctgtcagtgtggacatccttgtcttgtttaagattttaayaagaatgcctctattttgtttttatgtcctttggcttctaacaaattcccattatcatgtttcagaacattttttatgtttctaatttatacagagatta

SEQ ID NO: 50985 - DNA, 201 bp, Homo sapiens
ctacagaccacagtgagctttccctcctccaaatttttatgcgactgataggcaaacactgcactacataagctaataaatgccatcacttttcctcattrtttcaggtatataagtaaatatgggttcagttgttgtatttctacttaaaaggtaaatattcagggatgatacctcctatatttctcatttcctccctgt

SEQ ID NO: 50986 - DNA, 201 bp, Homo sapiens
gcagtgagccaatatcatgccactatactccagcctgggtgacagagcgagactccatcaaaaggagagaagaagaagaagaagaagaggaagaggaagargaagaaggggaaggggaaggggaagagaaagaggaggaagaggaagaagaagaagaaagggaaggagaaggggaagggggaggaggagagaggtttaata

SEQ ID NO: 50987 - DNA, 201 bp, Homo sapiens
ttttttttatttttgtttgagagtgtctagctttggggcccaggctggagtgcagtggtgctatctcagctcactgcagcccctgcctcctgggttcacaygattctcctgcctcagcctcccgagtagctgggactacaggcgcgcagcattatgcctggctaatttttgtatttttagtagagacaaggtttcaccatg

SEQ ID NO: 50988 - DNA, 201 bp, Homo sapiens
ccttccttgctctgatgcttagcatgcttcccaactccctactgctccctgctccgaggctcagtgtcagacacaaaagattctcagtggttatttattcatccatatgaaaggtcagcaatggaggctagaagaacatgctttcttattaaattatctcattctaagctcacaaatctatgagagaaattactggcatca

SEQ ID NO: 50989 - DNA, 201 bp, Homo sapiens
ggaaaagcgggaactctctgggaggcatcatgctagcaaagccagagatctcttggaagttttaactttctttgggagaattcttacaagccctggtatasagaaaagttaacacagagaaaattggtggctctgtatcgtctttacaattcacaaggtgaagagtctctaatggtgggctagcaaacctttaggacttcc

SEQ ID NO: 50990 - DNA, 201 bp, Homo sapiens
aaaaacagtctccaaaatttatttaaaaagcaatgaataaaaatatatatgtcaagaaataataaatactctgcagagtactaaaccatagtgtattagtrtgttctcacattgctataaggaaatacctgagactgggtaaattataaagaaaagagatgctgggcatggcggctcatgcctgtaatcccagcactttgg

SEQ ID NO: 50991 - DNA, 201 bp, Homo sapiens
accttgagtgtgtggcttacagcatctatcacagatcactgcctggcacacagtaggtcttcagttagtgactgaattaatgatttaccctgtgttcttgycatcttttgggaagtgctccacttttccctaaggatctgtatgatcccattttgtcataagaatatcagcccattttctaccattcatatggaaaatggt

SEQ ID NO: 50992 - DNA, 201 bp, Homo sapiens
aaatgaaataaaagcacctataactttacctctgaaaaggttatggagattaaagctttctattttatcatgacctggccctggcccaaagacctatgtcyatcagaaaagatacttaagtctaggagagtgaatgagtttacagtaatgacaaaagcattattccaaagagtgccttaaaattctcaaaatgctactaat

SEQ ID NO: 50993 - DNA, 201 bp, Homo sapiens
caggcctgtcctggctgccaggccagcagttcccccccacccacaccgtgctcccagaggactctctgtaatcagcctggacgtgggactcacaccacaargtcactgccgtgtgtggagtgagttgtctggtgttaagtgagggaaaggacagtgtgtgagattttgtgtgtggcttttggaactccattttgggaatgt

SEQ ID NO: 50994 - DNA, 201 bp, Homo sapiens
aagatggattaaagactaaaatgtaagacctaaacccataaacctagaagaaaacctaggcaataccattcaggacacaggcatgggcaaagacttcatawctaaaacaccaaaagcaatggcaacaaaagccaaaattgacaaatgggatctaattaaactaaagagcttctgcacagcaaaagaaattaccatcagagt

SEQ ID NO: 50995 - DNA, 201 bp, Homo sapiens
gtttcaactcctgaattcacacagagaaccaggatccaggccgtgctgtgaatgagatttgtttgaccccagtcatcagaaaagctttgaggaacgcactrtgatgttgttattcagtactggttacgaatagcatggaaagcttcagatctcacccttttcccaatatgttgttggtgttgttattcttgtctcctgttt

SEQ ID NO: 50996 - DNA, 201 bp, Homo sapiens
tcccatgggccagcagcctgccatagatgggctgcctaccataggtaagcatcctcccacgggccagtgtcctcccgtagatgggcagcccaccataggtsagcatcctcccacaggccagcatcctgccatatacgggcagcccaccataggtcagcatcctcccatgggccagcatcctgccgtagacgagcagccaac

SEQ ID NO: 50997 - DNA, 201 bp, Homo sapiens
actgtgttatgtgcccatagggagaggcaatgcggcttagtcgaaagttcatagcattgagaatccatcaacctgatgactctgccatgttttaactgttrgacaatggcttccaaacctttttttcctcaaccgtaacaataccaaccccacagttttgttgggaagattaaggccaggcgtggtggcttatgcctgtaa

SEQ ID NO: 50998 - DNA, 201 bp, Homo sapiens
caagatggattaaagactaaaatgtaagacctaaacccataaacctagaagaaaacctaggcaataccattcaggacacaggcatgggcaaagacttcatractaaaacaccaaaagcaatggcaacaaaagccaaaattgacaaatgggatctaattaaactaaagagcttctgcacagcaaaagaaattaccatcagag

SEQ ID NO: 50999 - DNA, 201 bp, Homo sapiens
ctcaagtgctcctcctgcctcaaggctccacttcccagagcactgggattacaggcatgagccatcaggctggcctacttgcctcaggcagctgacagccrttccactcactgagcatgagctgcaggattagggtggagaccccgccccccagcagacagccccacccacagtgctggctcttgggtcatggcctccctt

SEQ ID NO: 51000 - DNA, 201 bp, Homo sapiens
agtactatctagttaccaaattactattttccattcttcagtccattattactttttccgaatcatgtttgttgtccttcacagtcgtatcaatcattctstttctcagaccaaagtcggtatctgttctaacttaacacttagtattcctcttaacctaatttaagatcgtttattttaattaggctaaatttatcttgt

SEQ ID NO: 51001 - DNA, 201 bp, Homo sapiens
gatcatggcgggagatgaaaccgtgtcttacatggcagcaggcaagagagagagtgagagccaggtgaaaggagtttccccttataaaaccatcagatctygtgagacttattcactaccacgaaaacagtatgggggaacccacccccatgatttaattatcccccaccgggtccccccaacaagatgagatctggggga

SEQ ID NO: 51002 - DNA, 201 bp, Homo sapiens
ctgtgcacttcaggctgcaggaggggctcagggggttgccatgggtctctttccaggactagcccctccctggagcttgctcattacatggcaatggcaaragcggtttatatactttgacaggatattatttggttcagagtcatcagggttatcctcttcgtgaatgtccttccttatcaatataaaatcatatcatgt

SEQ ID NO: 51003 - DNA, 201 bp, Homo sapiens
gcagtccatcccaagtaaagaatagtttaatggatgttaatttttaaggacaacttagagaatcaacatgagaaagcttcttctcccaacagaagcaaagmaaagcaattaaaacctattgtgtggaaagagacccaaataattgtctattagggagaaaaggaacatgatagagtccaatttgaggtcattcttgagttc

SEQ ID NO: 51004 - DNA, 201 bp, Homo sapiens
aatattaacactaagtttattcctctccaaaattcaatgagttatgattccactctctgtaagtgttagtgttagtggtaatatgcaaaactgattttgtktgcagggttaagtagcagattgacttcgcatttggtggccagctgtgtaccctaatttttatctattttcttaataaatttaattacatttcataagccc

SEQ ID NO: 51005 - DNA, 201 bp, Homo sapiens; identical to SEQ ID NO: 8736

SEQ ID NO: 51006 - DNA, 201 bp, Homo sapiens
gtagacaggcagcctaccataggtcagcatcctcccacgggccagcgtcctgctgtagacaggcagcctaccataggtcagcatcctcccacgggccagcrtcctgctgtaggcgggcagcctaccataggtcagcatcctcccacaggccagcgtcctgctgtagacgggcagcctaccataggtcagctcctccacggg

SEQ ID NO: 51007 - DNA, 201 bp, Homo sapiens
caaggttgcaggtaagccatccctgccaaacagaggcccccactaggtatcacactgatctcaaggctgactgtggcccagcaaaaaatcccactggtgcwgaaaagctaggatccacagatttggcacaagtgaaaaaaatttttttcttttaacctgcataacaatatcaatagttttaaatttttaatttaagcataa

SEQ ID NO: 51008 - DNA, 201 bp, Homo sapiens
gtttattatggatagatcagggctgggacaagaacctacatcttgtaatcctagtacagtacatttttaggaagcacaacccccatagatgaccctacaargagcctatactggagtgaaataggaggctgtgagttttacaagacatcaaacaatggctgcaaacttgattttataggtttagtaatatctccagggaat

SEQ ID NO: 51009 - DNA, 201 bp, Homo sapiens
cttatgatggaaggagagaaatacagattggaccaaacctgagatgaccttcaggcacaccatggctaagggggtttcagtagatggtgacagtgcctctygttcaggtccccttcactgggctatgcaccaccccagctactgtgggcattggctgctaactgtggtcttctgcctgtgtctctgaagaatcaccctcag

SEQ ID NO: 51010 - DNA, 201 bp, Homo sapiens
ctacctaaatccagctagcatgtttgctcagccccacgtcagctagagtagaaattacttatccacttctcctctacacaaacctctctttatgagtacarataaggaaaacaagcctgccaaatgacagtttgtcattgcaggagccatggccaaaatccacatttcccatatctaatgagtgtgactccagccatgttc

SEQ ID NO: 51011 - DNA, 201 bp, Homo sapiens
caccatcaccactggctctactttgcaggagttatctgatccattttctctgttgtttccttgtgagggagagcagacatgcacaagctattgtcaaaggwcaaattacaacaaatttagtttaaagatctcgctgggctttatagcaattttagaattggtcaacacttaattccataaaatagaataagtgttccaatg

SEQ ID NO: 51012 - DNA, 201 bp, Homo sapiens
aaggctggcaaacaagaaaaacataagctcatttttctccccctcatcaacctcattccccaacctgtttgcatcctgaagagggcagaggcctccaaagytgctttagagggcagaggcctccaaagttgctttctgggtcactgcggggtgattcacccaacaataggctataatttacaaggtttttctctgcaagtc

SEQ ID NO: 51013 - DNA, 201 bp, Homo sapiens
gctaggtgggtgtctcatacatctatggacagctgtgggtcatggaggcaactttgctgatcttagccaggacctctagcatttctggggttttcgtgggrgcatttgaactgactcaactctgccccatgtggtctcccatcttccaggaggctagcccagcttggtgactatgtaggatcccaaggagagcagaggctc

SEQ ID NO: 51014 - DNA, 201 bp, Homo sapiens
aaattaattcaagatggattaaagactaaaatgtaagacctaaacccataaacctagaagaaaacctaggcaataccattcaggacacaggcatgggcaargacttcataactaaaacaccaaaagcaatggcaacaaaagccaaaattgacaaatgggatctaattaaactaaagagcttctgcacagcaaaagaaatta

SEQ ID NO: 51015 - DNA, 201 bp, Homo sapiens
tcttccatggcaggagcaggagcaaaagaaagagtgaggggaaggtgctacacacttttaaacaaccagatctcacaagaactcattcacggggagcaggyatcttccatggcaggagcaggagcaaaagaaagagtgaggggaaggtgctacacacttttaaacaaccagatctcacaagaactcattcactgtcatgat

SEQ ID NO: 51016 - DNA, 201 bp, Homo sapiens
acaccttatacaaaaattaattcaagatggattaaagactaaaatgtaagacctaaacccataaacctagaagaaaacctaggcaataccattcaggacayaggcatgggcaaagacttcataactaaaacaccaaaagcaatggcaacaaaagccaaaattgacaaatgggatctaattaaactaaagagcttctgcaca

SEQ ID NO: 51017 - DNA, 201 bp, Homo sapiens
gatttgggaggggcagaagtagccaagaaaggatgtggaaccaggtatgtgcatgtggcctgacccaccgggggctttggagcatcaacgccaccacacakttgtcccgcttgggggcaggagcattggttttatgtattcttatttcagccaggtttccatagctcctgagggtgattcttcagagacacaagcagaaga

SEQ ID NO: 51018 - DNA, 201 bp, Homo sapiens
ctggctagccatatgtagaaacctgaaactggatcccctccttacaccttatacaaaaattaattcaagatggattaaagactaaaatgtaagacctaaamccataaacctagaagaaaacctaggcaataccattcaggacacaggcatgggcaaagacttcataactaaaacaccaaaagcaatggcaacaaaagccaa

SEQ ID NO: 51019 - DNA, 201 bp, Homo sapiens
tatctgatccattttctctgttgtttccttgtgagggagagcagacatgcacaagctattgtcaaaggacaaattacaacaaatttagtttaaagatctcrctgggctttatagcaattttagaattggtcaacacttaattccataaaatagaataagtgttccaatgagcctagcagaagaggttggctttctagacag

SEQ ID NO: 51020 - DNA, 201 bp, Homo sapiens
ttatgtagctaagaaaaattatatgtccatatacttgcattttcactaaaaaatgtctgatacataaagagatgtaagaatgagataataattacctctaragagttgttttttattttcctttccatacagttagacttttcattgtgagcatgtaccacctttctagcttttttaaaaagcagtttatttgtaaatttt

SEQ ID NO: 51021 - DNA, 201 bp, Homo sapiens
gctgggaaaactggctagccatatgtagaaacctgaaactggatcccctccttacaccttatacaaaaattaattcaagatggattaaagactaaaatgtwagacctaaacccataaacctagaagaaaacctaggcaataccattcaggacacaggcatgggcaaagacttcataactaaaacaccaaaagcaatggcaa

SEQ ID NO: 51022 - DNA, 201 bp, Homo sapiens
aatggcatttatctattcatgaaggctccaccctcatgacccaatcacctcttaaagttcccacctcttaatattgttacagtggcaattaaatttcaacstgagtttaggaggggacactcaaaccatagcaataatatattcacctgcatcaaaaataatatatataggtgtgaagtttaaaaaaaaaaactccttccc

SEQ ID NO: 51023 - DNA, 201 bp, Homo sapiens
ctgcaagctccgcctcccgggttcacgccattctcctgcctcagcctcccgagtagctgggactacaggcgcccgccaccgcgcccggctaatttttttttgtatttttagtagagacggggtttcaccgtgttagccaggatggtctcgatctcctgacctcgtgatccacccgcctcggcctcccaaagtgctgggatt

SEQ ID NO: 51024 - DNA, 201 bp, Homo sapiens
gtggccagtgtaaatggggctgcctgtagggtggctgtgaagactgaataggataatatgtgaagtacttaacaagtccctggcatgtagtaagtgctatrgaaatgcttgctgtgatagtcaacctttgttttctgcacttcttcctctaacgggttatggtttagatgtgagccatagttgttctgtctcgatttctgc

SEQ ID NO: 51025 - DNA, 201 bp, Homo sapiens
cagcccaaaatctccttaagctgataagcaacttcagcaaagtctcaggatacaaaatcaatgtgcaaaaatcacaagcgttcttatacaccaacaacagrcaaacagagagccaaatcatgagtgaactcccattcacaattgcttcaaacagaataaaatacctaggaatccaacttacaagggatgtgaaggacctct

SEQ ID NO: 51026 - DNA, 201 bp, Homo sapiens
gttacatttattgttgaccacatatgcaggtatatctgtaagataaattcccagaaatagaatggttacagcaaagggtatatatatttgtaattttgatrgatgctaccaattgtcctccacagcaattgcagtacttatatttatggtacttctgaggtatagaaggtttttattttatcagttagaaattgtgtttgg

SEQ ID NO: 51027 - DNA, 201 bp, Homo sapiens
accagttcaaatgttacttaacatttgggttctatcaatcttttgctataacacagtgttacatttattgttgaccacatatgcaggtatatctgtaagawaaattcccagaaatagaatggttacagcaaagggtatatatatttgtaattttgatagatgctaccaattgtcctccacagcaattgcagtacttatatt

SEQ ID NO: 51028 - DNA, 201 bp, Homo sapiens
catctgcttcccttttcttccaaacactggatggcaacacacacaccaaaactttcaatagccaatactttgagtagtggaatgctttttgatttagggastcttttgagaatctgatgaaatcatgtgtcctatttccaaaaaaagtacatatttacattatttgtctataatttgtaagcattcaattaaattaattaa

SEQ ID NO: 51029 - DNA, 201 bp, Homo sapiens
gtcttttctcctaaaaccataagataagacccacccatattttgagggcaatctgctttactcagctctgctcacttaaatgttaatcacatctaaaaaaraaaaataccttcacagcaacatctaaactagtgtttgaccaaacatctgagcctcgtggcctagcccagttgacacataaaattagccacacatccagtg

SEQ ID NO: 51030 - DNA, 201 bp, Homo sapiens
tggccccatctatgttagaaaacttttctatcaaatcaaccacatctgcttcccttttcttccaaacactggatggcaacacacacaccaaaactttcaawagccaatactttgagtagtggaatgctttttgatttagggactcttttgagaatctgatgaaatcatgtgtcctatttccaaaaaaagtacatatttaca

SEQ ID NO: 51031 - DNA, 201 bp, Homo sapiens
cacttttttatttttttattttatttttaattacaaaagtaatgcatatatgcatttttatgctaaacatccaaacaaatgtagaagacaaaaaaaaaaaacacacttgttccaaatcaagcttatatcctccgcagaagaaaacactattatcaatttaatgtgtagctttcagacattttattatatgtcaacatggtt

SEQ ID NO: 51032 - DNA, 201 bp, Homo sapiens
gattcaatcttactggcctaagatgattccaatagatagatgaaaaatcaaaccccaaggtgaaaacactttttttttttttttttttttttttttttttktgagatgaagtctcactctgttgccaggctggagtgcaatggcgcgatctcagctcactgcaacctccgcctcccgggttcaagtgattctcctgcctca

SEQ ID NO: 51033 - DNA, 201 bp, Homo sapiens
caccagggactgttgtggggtgggaggagaggggagggatagcattaggagatatacctaatgctaaatgacgagttaatgggtgcagcacaccaacatgrcacatgtatacatatgtaacaaagctgcacgctatgcacatgtaccctaaaacttaaagtataataatgatataaataaatagataaataataatggccc

SEQ ID NO: 51034 - DNA, 201 bp, Homo sapiens
gcattactctaactggtttttccagtcatttacatttttacaaatgataattataattatgaaattacagcctttcagaacaggaagggatcctagaaagwcattaatttaacccttcatttaataaatgaaggaaataaatgagggaaagggcatcgaacactatgtttgtatgcttaactattccaaaaagcatttgag

SEQ ID NO: 51035 - DNA, 201 bp, Homo sapiens
aaggcgccggcggagggagcaccccgctgtggttttggcccgtggcctgccggctgttttgagagacaccaacacaataaagaagccgaccttccttcttyactcccccccaccccaaacttggcaagacccaggacccaaacgccattataaaatataatagtgattattattagttatacggaagcttacgtgctggag

SEQ ID NO: 51036 - DNA, 201 bp, Homo sapiens
cttagttttatagttgtataggaaccataatcattaggagttgttattctatcttattttgtgcatattatttatacatatatatatatatatatatataatgttgggcgactaatgaaaaatggttttcttataaaagagtccctttcttgtttaaatttattcgagtttaagaaatcaatgcatttgaaaagatctaaa

SEQ ID NO: 51037 - DNA, 201 bp, Homo sapiens
gtcttagttttatagttgtataggaaccataatcattaggagttgttattctatcttattttgtgcatattatttatacatatatatatatatatatatataatgttgggcgactaatgaaaaatggttttcttataaaagagtccctttcttgtttaaatttattcgagtttaagaaatcaatgcatttgaaaagatcta

SEQ ID NO: 51038 - DNA, 201 bp, Homo sapiens
ataatttgtgagggaaaatagtctggatgctattggctcattcattcgttctactaaaggtggaatgatatgttaatgtcttatcagccaagtcaacctaraaataagaatgtcaaccatgttaaattgtaagattattcaatcttatagattataattccctatagcatgcagagttatttcacaggctttatcttctta

SEQ ID NO: 51039 - DNA, 201 bp, Homo sapiens
actagttagtctgtaaaatgccctctgaggtcctaaatctgagattccagggactaacctgaagcctctccaactggttaatatcaaagccacgactaaaacccagcaattctaaccagtttgtgatccttcctttacatgtctttcttttcatctgagaaatagggctttttctttaaaccaatgctataaagtgtttgc

SEQ ID NO: 51040 - DNA, 201 bp, Homo sapiens
tattcttaatctttgaccttcccagtgccattcacacaatccataacagttctctcctaccctggaatattctctattagtctgactccacctttcaggartttctcatggtgtatgctccactgggggcacccattttgctttctaatgcagttaaggatgtctatataggcatgtatatatttacatatatatatatgg

SEQ ID NO: 51041 - DNA, 201 bp, Homo sapiens
tagttatttaaaatgtagctatatgagattcaacatttaccagcatttcatatttggaaactatttaagaaatgaagtggccaggcgcagtggctcacgcytgtaatcccagcactttgggaggccaaggcgggtggatcacaaggtcaggagatagagaccatactgactaacacggtgaaacatgaaaaccttgtgtta

SEQ ID NO: 51042 - DNA, 201 bp, Homo sapiens
atttatatagcctctattatatcttctaaaaatgattatatgtgtatgcttattaaattcataatgtaactctcttatttagttgttggctagaaaaccarcattcattcagcaaatagttatcaagtccaaactatatacagggcactcttctgcatactgaaatataacagtgaacaagacaaagtcctcctcccaggg

SEQ ID NO: 51043 - DNA, 201 bp, Homo sapiens
tctttttttttcctgagatagagtctcactctgttgcccaggctggagtgcagtggcacgatctcagctcactgcaagctctgcctcccgggttcaagtgwttcttgtgcctcagcctcctgagtagctgggattataggtgcgtgacaccacacctggctaatttttgtatttttggtagagatacggtttcaccatgtt

SEQ ID NO: 51044 - DNA, 201 bp, Homo sapiens
ctcagcactttgggaggccgaggcaggcggatcacaaggtcaggagatcgagaccatcatggctaacacggtgaaactccgtctttactaaaaatataaawaattacccgggcacagtggagggcgcctgtagtcccagctactcgagaggctgaggcaggaatggcgtgaacccgggaggcggagcttgcagtgagccga

SEQ ID NO: 51045 - DNA, 201 bp, Homo sapiens
agaatcgcttgaacctgggaggcggaggttgccatgagccaagatcatgccactgcactccagcctgggcaacagagtgaggctgtctcaataaataaatraataaataaaaggagtagataatcccctgctccacattgtgcgggggttcaaaatagcgtgatttatccactcattactcattatcttcccttccaggca

SEQ ID NO: 51046 - DNA, 201 bp, Homo sapiens
acggtaggcttgttcacaagctgctgtgagccaccacgtcctgggtttctttgttttgcagcaacagtagctggaacacaaacattgagctcatgatccgycgacatttcctcattggctttggccatttagcattgcaggcccagcccatgttgatttttttattcctttacaattaaaatgttttggttgtttttgttg

SEQ ID NO: 51047 - DNA, 201 bp, Homo sapiens
cagcctgcttcagctgctgttcagtgagaaccatgtgttcccaaaactgtaagtttagcctggccacaggggtaattgattttctttgatttgtttgtatraagcactatccagtcccattttacaagaaggagaattggagtagacagtttaaggagtggactacatactgtaaatgttcttgagtgataaggtgtgtgt

SEQ ID NO: 51048 - DNA, 201 bp, Homo sapiens
tttagtgttaagcaatctataacgctcttgtttgtttctttgcttgtttgtttgtttgtgacagagtccttctctgtcacccagactggagtgcagtggcrtaatctccgtgcactgcaccctccaccccactgaggtcaaccaatcctcctacctcagcctccctggtagctgggactacaggcatgtatcaacatgcct

SEQ ID NO: 51049 - DNA, 201 bp, Homo sapiens
atatcaccagtgattatctattcatgtaagattataaaggacttttatttccttcatcttctatattccaattattctataataaatattattttcatagyaaagaatacaataactttttccaaggtatgctaatgttgtattaagaaattaaggtgactggaaaataaaaattactataattgtttacaaaaagataag

SEQ ID NO: 51050 - DNA, 201 bp, Homo sapiens
actggagtacagtggcacgatcatggctcactgcaaccttgacctcctgggctctagtgatccccacctcagcctctcaagcacctgggactataggtgcrcaccaccacacctggctaattgttttctttttcttttcctttttttctttttttttggtagagatagggtcttgctatattgcccaggcttgtcttgaac

SEQ ID NO: 51051 - DNA, 201 bp, Homo sapiens
acgcagccatgctcacttttttacttgatatctatggttgcctgcatgctctaagggaagggtggagtagttgtgacaaagtccatatggcctgcaaagcytaaaatttttactatttgatcctttaagaataggtctgctgaaatcccctggtctaatcagttgtgtgtcaagatgtaggaaaatggttttgttagaaac

SEQ ID NO: 51052 - DNA, 201 bp, Homo sapiens
gtctcaaattatcttcttgctccagtattttcccttgacagagaagacactactatttattggaacatttttctccttaacagcttccattctcagaacakgaagccatgtttcaaaaattgacttcctgttggaaaatatattctctgggtgtgtctttttttacacttatttagataagttcgtttgatctagctaagt

SEQ ID NO: 51053 - DNA, 201 bp, Homo sapiens
ataaggaaacgtgcagtctgctgggatccatcacactgcttggtctggaaaaagaggagggtgaattcaaaactcttgtccctctctaaattcttgtaacyttctaatctctctggagtgtaaacttgtggccaagattttgagctctggataaattctagttttaatctcaggtccaccactcactcacttgccagttac

SEQ ID NO: 51054 - DNA, 201 bp, Homo sapiens
gctccattttctttcatagccaagaaagaatcccaaagaatccagactcaagggtcccaagatcacagcagtggggatgtcacccatcaacctggctgtcyttgagtcccactcatctccatcaggaattccaggccaaaatctcatggattcctagtcatggttacaaaggggctgggacgtagagtaggaccaccacac

SEQ ID NO: 51055 - DNA, 201 bp, Homo sapiens
tccggtgatctttcaccggttatgtaattaaaatgtccttcatctgtactagtaaggtcatcaaaataatttactgctctttgacttgatggcgaaaatargataacacctttcacaggatgccatgctccggggatgctgtccgaggtaccaagttctcgaggctgcctggggatggagggatgaagccctgaacagcta

SEQ ID NO: 51056 - DNA, 201 bp, Homo sapiens
tggcgttggctacttggccagggaagtctcccccacccccatcccccggagaaagaatagtttcctacagacgaggctggacgtttggacactgcaattcmcctcggtgtttctcccaccccgcgccgggaggacttccctcccagggacttcggtccctgctcctctccgggaacaacggcttcctgactctagatttgg

SEQ ID NO: 51057 - DNA, 201 bp, Homo sapiens
actcctagaggagcctcctccagtcaccatcgcgggtggggcgagccgggtctcctgctgggcttcccagccgcttcgctccggacctgcctggagcctasaaaaaacaagggctcgtccttgcactctcgccccccatggatcacccctagaaggtgctttccccaaccctcctggtgccaaggagagcaaacctccccg

SEQ ID NO: 51058 - DNA, 201 bp, Homo sapiens
gggtctgcatcctaggtgtccatgtgcaaaattggttatacccttggaaatgacaacaatgttctgtcttagtctgtgtcagagatgacagataaacacargttaagaaatttctgggtttctttgatatagaggacatccaagaaaccatgcatcaacattaggttgctattgacacccaaggaaactgatgtgtggtta

SEQ ID NO: 51059 - DNA, 201 bp, Homo sapiens
aaccaaataccttctctgggtccctaagatgcattgatctcctgctttcctccccagcactgtgcgaatgtcactgaatgatgggaggctgtttaaatggrtagaaatattgattttcttttctacctttttgaaagttctttgcttaccaggtgctgagcaaacatcaggcaaatggcagtccacatagaaatagatgat

SEQ ID NO: 51060 - DNA, 201 bp, Homo sapiens
gttgctgcctctgagctggaaagatgcaggttttaagagacaaacacaggtatacgccatcctttctttaagccacagctttataaaaacctagtcactcraacccaggctagcaactagttgaatgccattgatttcttagaggaattaaccaaataccttctctgggtccctaagatgcattgatctcctgctttcctc

SEQ ID NO: 51061 - DNA, 201 bp, Homo sapiens
atctcataataccactggagcaaaagaaaagtttcctattctttaaaatcaactggacatgatttatatgatttgtgtgtattgtggccaaactcttctttcctttcaattatagtagttaattatttgattatttattataaattaaaagggaagagaagggaaaatgctgttatcttttggaaagtctattttcttttc

SEQ ID NO: 51062 - DNA, 201 bp, Homo sapiens
aatctcataataccactggagcaaaagaaaagtttcctattctttaaaatcaactggacatgatttatatgatttgtgtgtattgtggccaaactcttctttcctttcaattatagtagttaattatttgattatttattataaattaaaagggaagagaagggaaaatgctgttatcttttggaaagtctattttctttt

SEQ ID NO: 51063 - DNA, 201 bp, Homo sapiens
aaatctcataataccactggagcaaaagaaaagtttcctattctttaaaatcaactggacatgatttatatgatttgtgtgtattgtggccaaactcttctttcctttcaattatagtagttaattatttgattatttattataaattaaaagggaagagaagggaaaatgctgttatcttttggaaagtctattttcttt

SEQ ID NO: 51064 - DNA, 201 bp, Homo sapiens
gaaatctcataataccactggagcaaaagaaaagtttcctattctttaaaatcaactggacatgatttatatgatttgtgtgtattgtggccaaactcttctttcctttcaattatagtagttaattatttgattatttattataaattaaaagggaagagaagggaaaatgctgttatcttttggaaagtctattttctt

SEQ ID NO: 51065 - DNA, 201 bp, Homo sapiens
agaaatctcataataccactggagcaaaagaaaagtttcctattctttaaaatcaactggacatgatttatatgatttgtgtgtattgtggccaaactcttctttcctttcaattatagtagttaattatttgattatttattataaattaaaagggaagagaagggaaaatgctgttatcttttggaaagtctattttct

SEQ ID NO: 51066 - DNA, 201 bp, Homo sapiens
ctatttccaaaaaaagtacatatttacattatttgtctataatttgtaagcattcaattaaattaattaatcaggttaagaactgcaaacagcatgtcttyatcaatgtgaagacgtggagaaaagggagagatctgggaacttcaagcccctatatttatacagaagagaaaaagatgcccagagaggaaaccacttgcc

SEQ ID NO: 51067 - DNA, 201 bp, Homo sapiens
ccagaaataccatttgacccagcaatcccattactgggtatatacccaaaggattataaatcattctactctaaagatacatgcacacatatgtttatttytatttgcttatttaatgtctttctggactaattctataaagtctgtaatttctataatgtgccattgaatctgcttggttaacttaatagttagccaatg

SEQ ID NO: 51068 - DNA, 201 bp, Homo sapiens
gtggagtggctggaggttgcacctgccccttgcctccggcactgcatggctgcactcctatccaccctcccagcccacaggtgaacactaagcagccccargccccattgccttggggtaagaaagtgggaagcaagaaactaatggtccaatcctgggttgtttaggtagagaggaaaatcctcagaagacaaggaaaag

SEQ ID NO: 51069 - DNA, 201 bp, Homo sapiens
aggggaaacaccccaagatgagcctccaaaaccaagaagtgtggttctgttgggaaggtttggaacttgcagggtcagaggccagtcagaaggtttctaayaaaacccctttctttctcctctgaggacatcaaagggtagttgtctatattcacagtcttcttaggcatctgatggagtaattttttctgagctgttgaa

SEQ ID NO: 51070 - DNA, 201 bp, Homo sapiens
ttttctccttccttctggaaccatgcatattttgccttaagagaacaaagtgatgatataaaaaaggtgtggtgtgtgtgtgtgtgtgtgtgtgtgtgtgtttcaatgaagaaaacatttcaaaacatactaaatgcccgcagtatgagaggcttcttactaggatactcaggtgaatgtttgggaatctaccactgtgtt

SEQ ID NO: 51071 - DNA, 201 bp, Homo sapiens
gctcaaaattaggggaaacaccccaagatgagcctccaaaaccaagaagtgtggttctgttgggaaggtttggaacttgcagggtcagaggccagtcagawggtttctaacaaaacccctttctttctcctctgaggacatcaaagggtagttgtctatattcacagtcttcttaggcatctgatggagtaattttttctg

SEQ ID NO: 51072 - DNA, 201 bp, Homo sapiens
tggtttcttaaaacctacaatgaatagaaaagggcagcaggggtgacacatttccagaaaggaacagccctgtatttcctcatcagacaatgggttggacrggtgggctgtgtgatgactgagccacacgccatttgtctctgtgttgaagaaacagaggcctaggtagcccaaataaattggtttctcgtaagaatgcac

SEQ ID NO: 51073 - DNA, 201 bp, Homo sapiens
atacatgttgcatctgtagctgaacttcatacaacgcacaccaactacatttgggagacagattcatttatttacaaattcccagtggccaccaaaacatytgatagttaaaaagcccatcttaaatgtttgtggaaatgaatggaattggatggttttagtagcttcaatttgactcatctaagaaaatagtataaccca

SEQ ID NO: 51074 - DNA, 201 bp, Homo sapiens
ctccagaagctggaaaaggcaaaaaaagaatccctgccccctacaagagcctctagaaggagcacagccctgctgacaccctgcttttagacctctgattyctagaactgtaagagaatgaatttgtgttgttttaagccactaagtcggtggccatctgttacagcagccacagaaaactgcccactgcaggatgaaaag

SEQ ID NO: 51075 - DNA, 201 bp, Homo sapiens
tctcctggtatttctcaaaggctaatctaagagcatggattgttctgtatcttccaggagcactattgcaaagtcgattcattacttttttcatttgttcygcatcaccgtgctggggctcattaacgccctgtcatcgggtgctctgtgcgtaagtagaagtgtgttaagaatcaatcgctctgacctttattccctgtt

SEQ ID NO: 51076 - DNA, 201 bp, Homo sapiens
gttacttgagcatccattaccaaactgttgcgtcttcatgagctgttctgatgcatccatctacttgccacgcgtggcacagctcccacccctaggcttaygcagtcttctcaggcctgtcctggctgccaggccagcagttcccccccacccacaccgtgctcccagaggactctctgtaatcagcctggacgtgggact

SEQ ID NO: 51077 - DNA, 201 bp, Homo sapiens
tttttctccttccttctggaaccatgcatattttgccttaagagaacaaagtgatgatataaaaaaggtgtggtgtgtgtgtgtgtgtgtgtgtgtgtgtgtttcaatgaagaaaacatttcaaaacatactaaatgcccgcagtatgagaggcttcttactaggatactcaggtgaatgtttgggaatctaccactgtgt

SEQ ID NO: 51078 - DNA, 201 bp, Homo sapiens
ctttttctccttccttctggaaccatgcatattttgccttaagagaacaaagtgatgatataaaaaaggtgtggtgtgtgtgtgtgtgtgtgtgtgtgtgkgtttcaatgaagaaaacatttcaaaacatactaaatgcccgcagtatgagaggcttcttactaggatactcaggtgaatgtttgggaatctaccactgtg

SEQ ID NO: 51079 - DNA, 201 bp, Homo sapiens
aatttgctgcgagttcttcgttcacttctttttctccttccttctggaaccatgcatattttgccttaagagaacaaagtgatgatataaaaaaggtgtggtgtgtgtgtgtgtgtgtgtgtgtgtgtgtttcaatgaagaaaacatttcaaaacatactaaatgcccgcagtatgagaggcttcttactaggatactcag

SEQ ID NO: 51080 - DNA, 201 bp, Homo sapiens
tgacaatttgctgcgagttcttcgttcacttctttttctccttccttctggaaccatgcatattttgccttaagagaacaaagtgatgatataaaaaaggtgtggtgtgtgtgtgtgtgtgtgtgtgtgtgtgtttcaatgaagaaaacatttcaaaacatactaaatgcccgcagtatgagaggcttcttactaggatac

SEQ ID NO: 51081 - DNA, 201 bp, Homo sapiens
gctgacaatttgctgcgagttcttcgttcacttctttttctccttccttctggaaccatgcatattttgccttaagagaacaaagtgatgatataaaaaakgtgtggtgtgtgtgtgtgtgtgtgtgtgtgtgtgtttcaatgaagaaaacatttcaaaacatactaaatgcccgcagtatgagaggcttcttactaggat

SEQ ID NO: 51082 - DNA, 201 bp, Homo sapiens
aagaactccataaccttagtcatccacactgaatagcacaactacttaataactcttgctagaatctagaacctcctgatctttttaatttactcagcagstatctatgacatgatactctgcacctaggacatgagcaaaaccggtgttgtccccatagagcttgcaatccaggcattccgaggactgtgttctgagaga

SEQ ID NO: 51083 - DNA, 201 bp, Homo sapiens
ggattcaatcttactggcctaagatgattccaatagatagatgaaaaatcaaaccccaaggtgaaaacactttttttttttttttttttttttttttttttgtgagatgaagtctcactctgttgccaggctggagtgcaatggcgcgatctcagctcactgcaacctccgcctcccgggttcaagtgattctcctgcctc

SEQ ID NO: 51084 - DNA, 201 bp, Homo sapiens
tgtacacaaataactttatgggagacagcattgtaattcaaatcaataaatgactcggtttggctgtacaagcataaacagaacgcttgcaaaatatggtycctccttgctagaaaccatttgatttttagccagaaaacatacagccaaacaagaataacaactgtttgccttccttaatgttcagtgtagactgttacc

SEQ ID NO: 51085 - DNA, 201 bp, Homo sapiens
gtttatatgcgagacacatatgaaaataatttaactgccttgacaattttttgtcactgaagctaatttgaccacaactttttggaaattgttgtgatgtgctgagattgtcgataaaaataattgaataaaacaagttcttacattgaaagtagaacaatgacacactcttaatttcctgacataaagtagacttcagac

SEQ ID NO: 51086 - DNA, 201 bp, Homo sapiens
accagcctcaaagtgcgcattaaataaacgaatgccaaaagtccatcatgcaccctgcacacacctagtgagagggtaggggaattcgaccactagacaargcagccattttttttctgttcatcaaagactgctttgtactgatccttgtcacccaacatctctttttgtgggatccttcaaattagtttatgtcactta

SEQ ID NO: 51087 - DNA, 201 bp, Homo sapiens
tccttaatgttcagtgtagactgttacccaaggaattaagcattagtcatcaaaacttcattgcaaaggcaacaaaataattggggttcctgagttatcayccatttcaacattcagaggccaatttgaccccagacaatacaaggtctttcttcttgttataaaagtggttgcagagttctgagggttctctgctgtaag

SEQ ID NO: 51088 - DNA, 201 bp, Homo sapiens
ctgaagatcctcaaagaacagaacactatgttccttaaagtgaggttttgaagcagaaatgacagaggaaaccaagaggagccagcctgcttaaaacctgmgttgtcttttgtgggctcattaaatatcaacataaaaacaatgcctcaatgttttttgatgtgtgagacatttttaagtggatgtaaaaccttcctccag

SEQ ID NO: 51089 - DNA, 201 bp, Homo sapiens
gattataaccctggccagccagtattcccccaagccaccctagtgggaggcctggggagccttcctaagcccctgggctttgtgtcatacctggccataargcttgcctgccttcatgctccagatagctttactctggtggcctcgttgcccttgcctaacacctgaccttgatgtaccctcccccagctcaccctgaaa

SEQ ID NO: 51090 - DNA, 201 bp, Homo sapiens
tatgtgcataatccttgagtttgtacatgttcagagactggccacaactgttgcatgataaattagtctttgtccaagtgaaagcaagtttcctgattaaracaaagcctagccattgccagaagctgcttgaactaactcagctcctaaattgcatttacatccaagagcttggggttctttctggctgtccaaaattga

SEQ ID NO: 51091 - DNA, 201 bp, Homo sapiens
ggcgaaaataggataacacctttcacaggatgccatgctccggggatgctgtccgaggtaccaagttctcgaggctgcctggggatggagggatgaagccytgaacagctaagcctggcgttggctacttggccagggaagtctcccccacccccatcccccggagaaagaatagtttcctacagacgaggctggacgttt

SEQ ID NO: 51092 - DNA, 201 bp, Homo sapiens
agcagcacccttttatatatgtgcataatccttgagtttgtacatgttcagagactggccacaactgttgcatgataaattagtctttgtccaagtgaaarcaagtttcctgattaagacaaagcctagccattgccagaagctgcttgaactaactcagctcctaaattgcatttacatccaagagcttggggttctttc

SEQ ID NO: 51093 - DNA, 201 bp, Homo sapiens
taacaggggacataatgaagtcacaggcctaaaagaaaggatccaatgactttgcaaggggctagcaagaaagcttggagactaaagtagcaaaaagagcwtctattaatgcttcctaaaacaatggcaggaaatcaattccatggggcttaactgatgcaggcctggaggcactaaaacccattttgcctggtgaagtga

SEQ ID NO: 51094 - DNA, 201 bp, Homo sapiens
ggtttatatgcgagacacatatgaaaataatttaactgccttgacaattttttgtcactgaagctaatttgaccacaactttttggaaattgttgtgatgtgctgagattgtcgataaaaataattgaataaaacaagttcttacattgaaagtagaacaatgacacactcttaatttcctgacataaagtagacttcaga

SEQ ID NO: 51095 - DNA, 201 bp, Homo sapiens
tggtttatatgcgagacacatatgaaaataatttaactgccttgacaattttttgtcactgaagctaatttgaccacaactttttggaaattgttgtgatgtgctgagattgtcgataaaaataattgaataaaacaagttcttacattgaaagtagaacaatgacacactcttaatttcctgacataaagtagacttcag

SEQ ID NO: 51096 - DNA, 201 bp, Homo sapiens
atggtttatatgcgagacacatatgaaaataatttaactgccttgacaattttttgtcactgaagctaatttgaccacaactttttggaaattgttgtgatgtgctgagattgtcgataaaaataattgaataaaacaagttcttacattgaaagtagaacaatgacacactcttaatttcctgacataaagtagacttca

SEQ ID NO: 51097 - DNA, 201 bp, Homo sapiens
gatggtttatatgcgagacacatatgaaaataatttaactgccttgacaattttttgtcactgaagctaatttgaccacaactttttggaaattgttgtgatgtgctgagattgtcgataaaaataattgaataaaacaagttcttacattgaaagtagaacaatgacacactcttaatttcctgacataaagtagacttc

SEQ ID NO: 51098 - DNA, 201 bp, Homo sapiens
attgttccaaagttttgtgagagcacacatattttcaccatatactaccaaacaacttttcaaatatttgtgatttgtcttctccagcaacaaatagaacycattctacacactgttcttcctgctggcaaccaacgtgccctactcataataggtgtttaatatgtgctccttgactatgactacagttggaccacaagg

SEQ ID NO: 51099 - DNA, 201 bp, Homo sapiens
ttaaacacctcttcatatgcttattgatgatttggatatcctcttttaaacacatttgtttcagatgctttgtcctgaaaagtttttcttttgggttgtcsatcttcactttttatttgtaggatttctttacctatgatggatagaaatttttggtcagatatatgtattttgaatatttgataccacccatttaatgat

SEQ ID NO: 51100 - DNA, 201 bp, Homo sapiens
tttgggaagaggaaaaaaaatgttgggctacaaaatataatagtaatatccagcagcacccttttatatatgtgcataatccttgagtttgtacatgttcrgagactggccacaactgttgcatgataaattagtctttgtccaagtgaaagcaagtttcctgattaagacaaagcctagccattgccagaagctgcttga

SEQ ID NO: 51101 - DNA, 201 bp, Homo sapiens
ccggggatgctgtccgaggtaccaagttctcgaggctgcctggggatggagggatgaagccctgaacagctaagcctggcgttggctacttggccagggamgtctcccccacccccatcccccggagaaagaatagtttcctacagacgaggctggacgtttggacactgcaattcacctcggtgtttctcccaccccgcg

SEQ ID NO: 51102 - DNA, 201 bp, Homo sapiens
aatctcatcttgaattgtactcccataattcccacatgttgtaggagggaccaagtgggaggtaattgaatcatgagggcagtttccccatactgttctcrtgataatgaatacgtctcatgagatctgatggttattataagggggagttttcctgcacaagctctctttttttgcctgctgccatccatgtaagacctg

SEQ ID NO: 51103 - DNA, 201 bp, Homo sapiens
gtactgggggtaaggacttcaacatttgaacttagagggaagagagtccagcccacaacaggcatgacccgtggctctgcccttggctaaccataggaccsttaaccagccacttggtgtcttcatgccttcactcctaacctctcatgtggttgtcggggaaaataactgagataatgtacatgagtactcagggcactg

SEQ ID NO: 51104 - DNA, 201 bp, Homo sapiens
tcctgccgtgcgatgccatgttatttaacatgaaaagcaggcaccacgtgtaagcatctcatggcattttcagtcaatgattgtcaagctgtactcagaarcccaggggccaccaggtagtgttgaagaggctctagaaaaaagaggaagtatttcagattctgaggaattcagtcgtcagtgttatttgtcttatagaga

SEQ ID NO: 51105 - DNA, 201 bp, Homo sapiens
gaagaggctctagaaaaaagaggaagtatttcagattctgaggaattcagtcgtcagtgttatttgtcttatagagagtatgatttttttttaaatcctayttctataaggaacaacataatcaacagagaacaaagaaacaggttgaaccctgccgttgaaatcaggagaattaaccttctcattggaggcatatttgct

SEQ ID NO: 51106 - DNA, 201 bp, Homo sapiens
cttgagctcaggagttggagactagcctgggcagtatagggagacctgactctttaaaaaaaatgtttttttaattagccaggtatggtggtgcatgcctrtagtccctgctactcaggaggctgaggcaggagaatttcttgagcctgggaggttgaagctgcagtgagctgtgatcatgccactgtattccagcctggg

SEQ ID NO: 51107 - DNA, 201 bp, Homo sapiens
ttttatttttgtattacgggcgtggtggcacacacctgtaattccagctactctggatgctgaggcagagaattgcttaaacctggaggggcagaggttgycgtgagccaagatcgcaccactgcactccagcctgggctacagagcaagactccgtctcaaaaaaaaaaaaaaaaatcatggaaaaagtgaataaatggt

SEQ ID NO: 51108 - DNA, 201 bp, Homo sapiens
ccatcaaaaaatattcatggaggcagtggctgacacctgtaatcccagcactttgggaggccgaggcaggtggatcacgaggtcgggagttcaagaccagyctggccaagatggtgaaaccccgtctctactaaaaatacaaaaatttttatttttgtattacgggcgtggtggcacacacctgtaattccagctactctg

SEQ ID NO: 51109 - DNA, 201 bp, Homo sapiens
gagatattgaagcttctagagtaaacacacaggcggcatggaggaagagtcatgcaggtccccatgaaaagatatctgacttgagatcactcccatttgayagcagtagcatttgctgttgagaaagcattcagaagtattcccatcccccaaactaactatagctttattgttgaatctgtttctctgctctgtgtccta

SEQ ID NO: 51110 - DNA, 201 bp, Homo sapiens
agtgcttccaaatttatttactgctgcctcaaaaacaccaagtaaatcatgcttttatacacgcacgcgatgcccatgttgagaagaaatttgctaagcgkctgtgtttgttgaatcctgagcctgcctctgcacctagaacaatcccaccatgaaatgaaatgaatgcttgcaaagatttcttacttcctcctttaaaga

SEQ ID NO: 51111 - DNA, 201 bp, Homo sapiens
gatggttactgcgggtccagagagcacatcttcctactccagcttccaaaggcaggaagcagaagcatagctgagaaaatgagaaagagctctttcttcaytcatgaaggggaaaaaaatctttgtcagatgccccctttatatcttttgctcagaacagatcacatggccttcccaggttacaagggaagctgggtaagc

SEQ ID NO: 51112 - DNA, 201 bp, Homo sapiens
atgaaggggaaaaaaatctttgtcagatgccccctttatatcttttgctcagaacagatcacatggccttcccaggttacaagggaagctgggtaagcagstgtctggctcttttagtctccacagtgagaatcagtcataggagatggggattgaaaatgtttaaaaggtaagcacccaaagaactgacatggatagatc

SEQ ID NO: 51113 - DNA, 201 bp, Homo sapiens
tacccacataaggacatcataaggatgagtaatgcatacaaaatatctaagagtcccctatacaaaatacgcactccatatgtgctacctgatatcattayagtaaaaaaaaattacacaaaatgtaatttttactaattttaattacaaaatgtaattaaaactaagtcttccttccaccctagaccccacgcctctccc

SEQ ID NO: 51114 - DNA, 201 bp, Homo sapiens
gctacatttttaatacttcctccagcacactggctcactacgctggctggtcatttgaattacctggaaagttttaaacaccgctgaggccagggcccatycctagcaactctcagttccctgctctggtggttggcctgagcacagggcttttgccaccttcccaggtgattgcactgtgcagtcaaggctggggacctc

SEQ ID NO: 51115 - DNA, 201 bp, Homo sapiens
ggttaaattattagctaaatgtatatacttggatttaaacagaatgatccactgatgttctaggaagtaaatgcactaacttattcttttttatttgccargtatttgcttttcttttaaataatgcatgcagtagaatatgattaatataattctgatgcagaaaagcaagattgcacacttaggagagaggtctctgga

SEQ ID NO: 51116 - DNA, 201 bp, Homo sapiens
aagtctgtaatttctataatgtgccattgaatctgcttggttaacttaatagttagccaatgacagggcagaggttttcttaaagaccttgaatcaataargctttttgtttttaccctttgctaaggggctctgttgtgtatatcgggacatatcctcaattctcaagcaggcagttttaaactctgctatggccttcac

SEQ ID NO: 51117 - DNA, 201 bp, Homo sapiens
gcttataggatgaggatgacaataagggtattacccacataaggacatcataaggatgagtaatgcatacaaaatatctaagagtcccctatacaaaataygcactccatatgtgctacctgatatcattacagtaaaaaaaaattacacaaaatgtaatttttactaattttaattacaaaatgtaattaaaactaagtc

SEQ ID NO: 51118 - DNA, 201 bp, Homo sapiens
gtaaatgtatgttttcatttctcttatatgcacccgtacatggaattgctgggtcatatgacaagtctatatgtttaacattttaagtaactgccaaagakctttccaaataggctgtaccattttactatcccaccaacagtgtatgagggttcaaattcctccctatccaggtcaacacttgctggtttgggtgcagtt

SEQ ID NO: 51119 - DNA, 201 bp, Homo sapiens
atttccttgaggtcgggtttgtgcacaactataaccatagagacctgtttcttgtgcttcgtggacatgctagtaggtatatagtgccatttgtgtgaaaytgaaaatgacattccctactggtgggtgaactgggaaacagcaccctgtctatgggcaaattagaaaagatgtccccttctgggtggacaaatgagcaaa

SEQ ID NO: 51120 - DNA, 201 bp, Homo sapiens
tctcccaggaacacggattgcgggccagatacagaattaaacttttaaagtgaatgaaagcaatctggggtctaagtggggaaggagtcgaaaaactggcracttgccagtagttatggtcagtggagacgagaagacttcctcctctctgaaagccaagtgttgaatgaagacctagatcctggaataaaggatcaacat

SEQ ID NO: 51121 - DNA, 201 bp, Homo sapiens
actcttaatgatatttgttgagtgaataaataaggtcaattgtggacaacgtcagggccttgggcatggggtttaaaacccataaggggaaaggaaaccakcctatgctagtctgaaggaagaagctggttgtgagctttctgtgtaaagcaaggaaactctagaggccatctcacttgtgatgtgagaactagaacatct

SEQ ID NO: 51122 - DNA, 201 bp, Homo sapiens
aggatggaaaaccccaaagacatgctttggctccaacacaattttgtgaggtttggtccagtgcagcacactaatccagcactccagggaggactagaaaygtttaaagtctcccagcgctttccctttactgcgcctctggctgtacggacctaatgagatgccttgtgtttttcagaatgccgaagcaagttacgactt

SEQ ID NO: 51123 - DNA, 201 bp, Homo sapiens
agaatcgatcacttattttaaccccagggagtacaagattcaagcattggtgcgttcacttaaaattatccaaactatttctaagctatacttctgagacytccagatctaggtgtaaaaaatgttgtcttagtcattgaagagactcatatttagagaacaagggcttgcataaaagaaaggatggttacccagcaaaaa

SEQ ID NO: 51124 - DNA, 201 bp, Homo sapiens
tttttggaaattgttgtgatgtgctgagattgtcgataaaaataattgaataaaacaagttcttacattgaaagtagaacaatgacacactcttaatttcytgacataaagtagacttcagactgttacagcgtattggcagtttctccattagaaaattgacaagaatggggagaaaactgtaggatcctggggttgctc

SEQ ID NO: 51125 - DNA, 201 bp, Homo sapiens
gtggcactattgacaatagcaaagacttggaaccaacccaaatgtccatcaatgatagactggattaagaaaatgtggcacatatacatcacagaatactrtgcagccataaaaaaggatgagttcatgtccttttcagggacatggatgaagctggaaatcatcattctcagcacaccatcacaaggacagaaaaccaaa

SEQ ID NO: 51126 - DNA, 201 bp, Homo sapiens
attataattttaaaccagctaaaaacctccaattaggactaattagtgcttagggcaataaaactcatcattgtcagcggtaagaattcccaagtgtccarttacccaagacacagtcatagtgactcaggcaagcatgatccccatgccttagggagccaatgattaagacagagtgtccactttgaccagtaaatgggt

SEQ ID NO: 51127 - DNA, 201 bp, Homo sapiens
ctcatttcgttacatacagaacgttcgtgcttcctccctctcaggcaagaagcggagtccgtcgtcagcagttagcagagtccagtgcgagtgcacgtttyttaaccggataacttagttgcccctgccccccgtcgctgcgcccgaattcgcctccagtagaagacgttcagcgggcgacttggcccggcgcctgggatc

SEQ ID NO: 51128 - DNA, 201 bp, Homo sapiens
catgattgtgaagcctacctaaccatgcggaactgtaagtccaataaacctctttctgttgtaaattgcccagtctcacgtatgtctttatcagcaatgtraaaacaaactaatacaacagtacaatatgacagtagagaattgttcctacctgattaatgtaccattactgcatttaaaatgtttgcaatgaatgcagca

SEQ ID NO: 51129 - DNA, 201 bp, Homo sapiens
ttatgttgcaaacacaaagaactttaagtaagcacttgctttgaggagtcatttcatcccctcatcactgggcacgggcggtggcctcttcctgcccagcytcacatttcttgccagatcctcgccaccttcttttatctgccccttggtttctttagtatctcctcctctcatgggtgtgggcagattcttcccaggcag

SEQ ID NO: 51130 - DNA, 201 bp, Homo sapiens
actggcaggttcagtgtcttgcaaaggctcactctctgcttctaagatggtgccttgttgctgtatctcatagaggggacaaacactgggtcttcccatgrtggaagggccaaaaggggcctagctatttccctggagcccttttataagggcagtaatcccattcatgaggaccaaactctcatgacttaattacctcct

SEQ ID NO: 51131 - DNA, 201 bp, Homo sapiens
aattcaacatggaaattgacgaacactaaaaataaagcccttttacgcccccttcagggagctggttgttaaacattgaatagcacacctctcgttagagkactcttctgacttcccttaaattatagcacttacatacctatgtgttctccctgcaagtaacagccacccttgccttcatgagtctggaagttccctttg

SEQ ID NO: 51132 - DNA, 201 bp, Homo sapiens
gagacagagtctcactctgtcgcccaggctggagtgcagtggctccgtctcggctcactgtgacctccgcctctctggttcatgcgattctcctgcctcakcctcctgagtagctgagattacaggcacgcgccaccacgcctggctaatttttgtatttttagtagagacagggtttcaccatgttggtcaggctggtct

SEQ ID NO: 51133 - DNA, 201 bp, Homo sapiens
gagaactatacatttacttcaacattttaaacattctgttaatgaatatgcacatgtgtgcacgcaaacacacacacacacacacacacacacacacacasagagagctatgggaatatgctgcacaaatctctgacttcagggaaaataattgaccaaggcccccagctgctgcactctgaaatctgtcactgtgccaac

SEQ ID NO: 51134 - DNA, 201 bp, Homo sapiens
tattcttcatggtgaagctttgatagcattctctaagtctgacaagatgtgggttctccctatcatccctttaattcaacactatgctacatttcatagcygatcaaatagttataaatctaagaaaaggtgtgagatcattaagaagaaaattataaaatttacaaaagaataaaggagtcctaaataaatagagtggca

SEQ ID NO: 51135 - DNA, 201 bp, Homo sapiens
aggcacccacaccacatactgagcataaataaattccaggagaatgaaagacctaaatggatataaatcttttaggaaaaaataaagaaaaacatctttaygatcatgacatagggactgatttcttcccttttctccccaattgatttagaagtttattttgccaaggttaagggtcatgacccatgacacagcctcagg

SEQ ID NO: 51136 - DNA, 201 bp, Homo sapiens
tatacagtttgaaacatgcaaagagtgacatgtatgcttatgcatacctgattataagttcataaaaatgttctgaacagcaaatttagtacacttgttamctctgaggaagcaaagaggggaaggaatggcatcagagagggcctcaaattgtatctgtaaagatttatgttgtttcttggcgcggagggggttgttttt

SEQ ID NO: 51137 - DNA, 201 bp, Homo sapiens
tttagtacacttgttacctctgaggaagcaaagaggggaaggaatggcatcagagagggcctcaaattgtatctgtaaagatttatgttgtttcttggcgyggagggggttgttttttgttttttgagacagagtctcactctgtcgcccaggctggagtgcagtggctccgtctcggctcactgtgacctccgcctctct

SEQ ID NO: 51138 - DNA, 201 bp, Homo sapiens
gtgctgggattacaggcgtgagccacagcgcccagccttttatttttatttgagacagtctcattctgtcacccaggctggagtgcagtggcgtaatcttrgcacactgtaacctccgactcctaggttcaagcaattctcatgtctcagcctcccgagtagctagaactacagagacaggccaccatacctggctaattt

SEQ ID NO: 51139 - DNA, 201 bp, Homo sapiens
cttattattagaatttatccttccaaaacagtttatcgagtaggatctaataaaattataggaataatcaataggaataagattaaaatgtgctagttcakgttatcctagtagctgtaacaaataaatcttggccctgaaatattagtggcttagcggcttagcaccaaaagaagtgtatcactcacccaccagtccatc

SEQ ID NO: 51140 - DNA, 201 bp, Homo sapiens
gagtgaataattgcccaagggtaatttttatgggccaggttaacaaatagcatttacccatctgctcacatatttgccataactcagtcacatggccacayacaagtgcaagggaggatgggagccttactgcagcctggggagaaaagagaatgactggtgaccatttagcattttctgccaccaacaaaaaccatgtta

SEQ ID NO: 51141 - DNA, 201 bp, Homo sapiens
cacagggcccatctcatagtaggtgctggtaaaagaggttgttttattcatattgctggatatatctaacactattccctaagtgtagtacatatataaayacatgcttttggctggaaaaactaagtgagatgatcaaatcactctgatggaaaagccagcagtgtggatggaaaaggtgtgcctgttctttctctcagg

SEQ ID NO: 51142 - DNA, 201 bp, Homo sapiens
gagacggggtttctccatgttggtcaggctggtcttgaactcctgacctcgtgttccgacccctcggcctcgcaaagtgctgggattacaggcgtgagccwccgcgcctgacctaagaactcttaaacctccagaaagcatgcttcattttctgcagcaaatgagctccagatcatggcctggaaactaacaccctgtgac

SEQ ID NO: 51143 - DNA, 201 bp, Homo sapiens
agggcaggaggggagcaccgcgggagagaaggagagagagggaatgagggcgtatgctgagatgaacggcagtttatctcccagtttctgaatatgcttascattccatcataatctgcatacatgtggaatttaaggccagagagaacactggaaataatgttatccaagtccctgtaaggaatctgaggtccggagatg

SEQ ID NO: 51144 - DNA, 201 bp, Homo sapiens
aggaggctttgcaagaacaaagcttttggaacctgtattcctgggtggtgctggagccattcattcctagccaggtgccatgagcactttctctgtgggcsctgttggctcccctttacctctcacccccaaacgcctttccagggaggtgtagtgctgagtgcactggtcagatgtggggacactgactgttcacagctg

SEQ ID NO: 51145 - DNA, 201 bp, Homo sapiens
ctagtggcaagtctaatggccacaataatttcagagcagcagtgatgactaattgctgctgcaggatccatgcagtggctgtggtgggacacgaaaatctrccagctctttgatgacaaagtccgaggaggagctaatgccactctgctttgtggcctgcattcataatcgaaagagaagaaaagtttctgttataatcta

SEQ ID NO: 51146 - DNA, 201 bp, Homo sapiens
cagtgcatgctgcacaggcagacagagaaggctctaaatgaatggaagagacccacagagtcacctctactcattaatgtgctgtgcaggcctgcctgggrtcagatagaaacacttgatgtgtgcctgtgtctgttcttgcccatcaaatacacatatcagcattgttagggatgtgaagacacagactcctagctcctt

SEQ ID NO: 51147 - DNA, 201 bp, Homo sapiens
cagctagttctcagcgtcacatcctcaccaacctccgctccctgctctccactggggatcaagggaatgcaggatggagctgccccaagcctgtagctcakatgcctcacaggggcatttctgatctgcaacactatgtccctgttgtgagctgagtcccaggcctctctgaggttggacatcccagcgtgcctcttccca

SEQ ID NO: 51148 - DNA, 201 bp, Homo sapiens
ccaaagtctcacaactaattctaaccaccattcttggtacttgaaacctaatcctttgctctgccttcctggtgagactttatgaatgggagcctcattcraaatagcattaggagatatacctaatgttaaatgacgagttaatgggtgcagcacaccaacatggcacatgtatacacatgtaattaacctgcacgttgt

SEQ ID NO: 51149 - DNA, 201 bp, Homo sapiens
ttctgctctttgctgctttcaaaccagatttaatttgggttttgtgctgggcatcctcttcttgtctctatgattcttcaatttaccttttgttccttttyaccttttgtatcttttgtttaaaaaggtaaaattcttcaattttactgcttatcttgtgtttttttcctctccgtcttacggatttgggctcctattttg

SEQ ID NO: 51150 - DNA, 201 bp, Homo sapiens
caaaagtaatgcatatatgcatttttatgctaaacatccaaacaaatgtagaagacaaaaaaaaaaaacacacttgttccaaatcaagcttatatcctccrcagaagaaaacactattatcaatttaatgtgtagctttcagacattttattatatgtcaacatggttatacatgcacatatggaaatagagagtttaatt

SEQ ID NO: 51151 - DNA, 201 bp, Homo sapiens
gataatagctcctctatcatgttttataaattgggatttggtttaagatttccctggtatcatgggtgtgaaggagtgggggtccttaaaataaaaaatartgtttgaaaacctttgatagctaaacaagttcgattctttagcctagtcaatcagtgtatccaacagggataacaagcttgatgcctacacaggccatgc

SEQ ID NO: 51152 - DNA, 201 bp, Homo sapiens
ttttccccttttacacgtttaagtaacagggactgcctggtgcaacatctgcctagaataaacctccttttggatccatgtcttgtccattcttcaagacytaaattcaaacctttcctgatgctacagaccacagtgagctttccctcctccaaatttttatgcgactgataggcaaacactgcactacataagctaata

SEQ ID NO: 51153 - DNA, 201 bp, Homo sapiens
cccaagtctatagtttggctggaaagttctattgatctggaccaggctaggcttgtcttggctgagctcacccttgtctccctggtcagctggcaggttgstgggggctgattggtttaggatgacctcactcacatgttgatggattactgttgactggggtgtcaggcattacaggttatgtgtctttcatcatccaat

SEQ ID NO: 51154 - DNA, 201 bp, Homo sapiens
tttttaaaaaatacattcccaagcctcacccaagcctcatagaatacaaatccctagggatgggtggcccaggaacctgacttttcaatgcctgttccccrggaatacttaagctgccagcctgtcgctgatctgtggactagggtgtgaggatgatcaataaggcaatagctctgtgaatctatgactctgggtgcagag

SEQ ID NO: 51155 - DNA, 201 bp, Homo sapiens
taggatgacctcactcacatgttgatggattactgttgactggggtgtcaggcattacaggttatgtgtctttcatcatccaataggctagcccgggcttrctcacatggagcctagacagggtggcaagagaaagcagaaaagccacatggtctcctgaggcccaggctcatcacttctgccacattctttcagtcaaaa

SEQ ID NO: 51156 - DNA, 201 bp, Homo sapiens
ctgacggtaagcaatttgtaacattctttttatattatgagcaaaataaaaaaattgcttgaatgtttcagaaattttgggcttgtgagaggctacttaargccatgcccagcaagttccaactcactgctctcactgagcagggtttctcagcctgggcatatggacattctgggcaaaatactgttttgtcggtggtga

SEQ ID NO: 51157 - DNA, 201 bp, Homo sapiens
tccagtcccatgcctgtgccttagggaacccagtgtcctctggctccctggggcgtcagcatgaattcttgaggaagcactggggaattactcatggattrcaaaaacagcagagtttatcttacaaatttaaggaaaacattttattcatcctggctggcaattccaaaagttggctggtttttaattatttgctaaaaa

SEQ ID NO: 51158 - DNA, 201 bp, Homo sapiens
aaagctgaattagttttgttaaggaaatggaatcgtcaagtagtttgaatctagttaatttgcttttgagaatgacagacattaagtcaaagtgatgctcyttttccatgcatgatgctgtatacactaatcactggggctgagtgatttcaaagagttttgcattcatttactgtcttagctgggattcctccaaaagct

SEQ ID NO: 51159 - DNA, 201 bp, Homo sapiens
acaacatcttcaatcaaaaagattgagtcaaaaattaaaattaagtgtgttattcaaaatccacaaaaccaagcaaatgtaccacaaacaatgaccttccraatgatggtttttgcaaatttgtcaaatgtatatttctgaaaatattaaagctcgagaccacatcaaggagtcgtaacactgtctcctgccttcaggcct

SEQ ID NO: 51160 - DNA, 201 bp, Homo sapiens
tccatcccaagaaaacagagaactacagaaagcagcaggaatgattcccttgatgcttttaattcattcatttgtgttatatgcaattaacaataggccawctgatttctcaaagcatgcaatttcaagctgaaaaattaacctaggttattttccactcagttaagtatcaaaaagattttgaaaaataaaaaaaagaaa

SEQ ID NO: 51161 - DNA, 201 bp, Homo sapiens
gactaacatgagttttcagaacctaaaacctggatgagcatgaatttcctccttatcatccagagctaatattcatgagcacaaaaagtggcattgatgarcaccgaagtttgtgggcagatgtagtatttactggaggcagggacaggcacaccttgtgcaacaggagcagaggcagagagggtgcagctcaaatcccct

SEQ ID NO: 51162 - DNA, 201 bp, Homo sapiens
tatctacgctctctctctctctcccagtctgtctgcctctctccctctctctctccttctctccctctctctcactcggtctactctctgtctccaccccwcattcccctgtagctcctagagcatccaggggcagaggagaggccttccctaaaaacccttgggtcacgctgagcctctgtcttggcttggtgcagttgc

SEQ ID NO: 51163 - DNA, 201 bp, Homo sapiens
ctaaatgtttaatgctcattcatgcatgatttgcggtgggatgggatgggaaggcaactagaaatctcagctcacagagtttcaggtgccagaagagccamatgaggctggtaattccttaggcctaacgtcactgttactgatttccaaccaggaggctttgggccaacctgccctccccatcccaagatggggtgtgcc

SEQ ID NO: 51164 - DNA, 201 bp, Homo sapiens
tatattgttaaaggtgttcgtctctttcaaagtgtaactgtggacaagaagataaactgacagactcagaaagcccccttcagtctcaagactcctaaatwgctgagttgcaaggaggcagtgcccagagaatgcagcattcctaagcatcactagtttccattaaaacctaatttatggaattaaaaattaatttcatgg

SEQ ID NO: 51165 - DNA, 201 bp, Homo sapiens
acgctctctctctctctcccagtctgtctgcctctctccctctctctctccttctctccctctctctcactcggtctactctctgtctccaccccacattyccctgtagctcctagagcatccaggggcagaggagaggccttccctaaaaacccttgggtcacgctgagcctctgtcttggcttggtgcagttgcttgca

SEQ ID NO: 51166 - DNA, 201 bp, Homo sapiens
agtgcagtggcgcgatctcggctcactgcgggctccgccccctggggttcacgccattctcttgcctcagcctcccgagtagctgggactacaggcgcccrccacctcgcccggctaattttttgtatttttagtagagacggggtttcactgtgttagccaggatggtctcgatctcctgacctcgtgatccgcccacct

SEQ ID NO: 51167 - DNA, 201 bp, Homo sapiens
gaatgatgggaggctgtttaaatgggtagaaatattgattttcttttctacctttttgaaagttctttgcttaccaggtgctgagcaaacatcaggcaaayggcagtccacatagaaatagatgatgtgaggagcaacaatggcagttctggcttctgaatgtgaagctggttaagcagcaggtgcccccactacacactg

SEQ ID NO: 51168 - DNA, 201 bp, Homo sapiens
gggctggcattcgttggtttgtggggcagcagaaacctgctttggccggggttgaatttctcaccttccagttgagtgggccattcagtcctggtcatctyggcactaggcaagttcaagagcatctgagcaagtgaacgccagcctctgtctatttcccacccacagagtgggcgtgactttgcacaagaagaagctgca

SEQ ID NO: 51169 - DNA, 201 bp, Homo sapiens
ttccagtctgggaacatttggataactttcagtttggacgattataaataaaatcgttatatacatctacacacagatttttgtatagaatttagatgtcytctgtcttgggattgaggggctgtatggtaaaccaactgctctttaatgtctagaaaatgtgacagtcctcagagtcatggagcctagaaaacagtgcgg

SEQ ID NO: 51170 - DNA, 201 bp, Homo sapiens
tgacagcaatggtggttcataatcttcaaagtatttttatgcccatcatctcatgtgattaaaaaaaaaaaaacctctgaggttggcagaagtgtgcaacyttatttgataaatggtaactaagactcagaaaagtaaagtaattgggtcaaaatcaaacctgtaggctaggaccctggtcttggatgctaggaactatga

SEQ ID NO: 51171 - DNA, 201 bp, Homo sapiens
actttacagcgatgctatagggaagaaaggagaggcagccgtcagacacagaattactaatacagtttagaatagccatctctgcctttctgtcctctccraagtccctctcagctacagtgcaaatgggagttcctctttcctgaccccacccgctcctgcactgcccctgcccctctctctgtcccctgccctctgccc

SEQ ID NO: 51172 - DNA, 201 bp, Homo sapiens
ctattccaaaatgcctgaaaaaaatacacctaaaaaaactaaaaatcaggatattaatttgtactatatgaaatcggttctatgaagcagtcttgaaaaaractttatcataagttatttttagtttgttcagagtgataaatgcatgggtgacatacattttaaagaaaactaaatgatggtggaaacataggcaaaaac

SEQ ID NO: 51173 - DNA, 201 bp, Homo sapiens
tgaggatcaaccataggaccaaagctcagcctctccaggaccatagtctcagggggctcagacttctttacaggctgactggcttgccctaggccaaaacrcaagatgtccttttctgacgtattcttgtaagtcagacagcatcacagcatcactttgtgtgtgtgtgtgtgtgtgtgtgtgtgtgtgtgtgtgtgtgtg

SEQ ID NO: 51174 - DNA, 201 bp, Homo sapiens
gctcaagtccacagaaccaagaaaatccttagttcaaaacatcaccattaccctgaagatgattcctgcttgagtgaaggagaatttgaataaagcgtccyttccatgagtgtacgatatgtttatttcaaaacccctctgggatgaaatgatattatgcctgatgttttcttcagtattacttatggcttgtggcaggag

SEQ ID NO: 51175 - DNA, 201 bp, Homo sapiens
tctaagcagtggaggctttcacctgttggccttgaagatgccactgccataatgtgaacagggccacatggcaaggaatggcggactccctgggagctgargcctcactcctacaaccacaaacaactgaatgaacttgaaagaggaccccaagccctagatgagacagctccagtgacaccttgatttcagccaggtgag

SEQ ID NO: 51176 - DNA, 201 bp, Homo sapiens
ttccctccagactcaggttctttcttctgagaagaaaccttacattttttttgggggggggggttgtgtttttgttttttgttttttgtttttttgagacrgagtctcactctgtctcccaggctggagtgcagtggttccatctcagatcactgcaacctccgcctcccaggttcaagcagttctcctgcctcagtctcc

SEQ ID NO: 51177 - DNA, 201 bp, Homo sapiens
cttgctcattacatggcaatggcaagagcggtttatatactttgacaggatattatttggttcagagtcatcagggttatcctcttcgtgaatgtccttcyttatcaatataaaatcatatcatgtaatggtttttgcctttgagtctacttcttccaggataaacactgccacctttactgtcttattattacatcagcc

SEQ ID NO: 51178 - DNA, 201 bp, Homo sapiens
acgcctttccagggaggtgtagtgctgagtgcactggtcagatgtggggacactgactgttcacagctggagtgaagagggacagagacttctcctcgtcyccccaccatccttctgttcctcctcccatttgtcctcccaggagctctccttattagactgaggccctttagcctgcctgcaatggaaaacagagccatt

SEQ ID NO: 51179 - DNA, 201 bp, Homo sapiens
cgtgtttttaccatgtgtcattgcttaattcctttccatttagaaataatattccattgtacatatatatcattttgtttactgttttatcaattgatagmaatgtgggttgtttctagtttttgactatcatgaataatgttgctatgaacatttgtatacaagaatttgtgtaaatgtatgttttcatttctcttatat

SEQ ID NO: 51180 - DNA, 201 bp, Homo sapiens
gcgtaacaaatgcacgctgtgctccagcagggatgttgataataatgggaaggcagtgcatgtgaggagacagaggatatgtggaactctctgtgccttcytctcaatttgctgtgaacctaaaactgctgaaagacacatagacgaaagaaagaaagaaagaaagaaagaaagaaagaaagaaagaaagaaagaaagaaa

SEQ ID NO: 51181 - DNA, 201 bp, Homo sapiens
atttgataaatctcttcacctttgcgtaatctaatcacagaagtgaaatctatcatcttcacagtcccacctaggctgtccacactcaaaaggaagatgaytacatagggcatgtacatcagggagcagaaatcttgggggccatctcagaattctgccggctacagacaaacagccacatggctttcctaagtagttata

SEQ ID NO: 51182 - DNA, 201 bp, Homo sapiens
atgcagatggggacttgtgttgcatttaggacacacttaggaatggactccagctggcttctcttctcacatttgatttgctttgtcttcagttagctaaragcaagaagattaaagtccaggcatctgggcagctttggagtgagatgagcctagcttgaggtgttttggaacaagggaagtcactaccccactgccttt

SEQ ID NO: 51183 - DNA, 201 bp, Homo sapiens
catgtgaccatttttataatgtgtgagaattttttaattttgaaaacaacctaataatcattatgctgccaggtagtaaaaaattaataaatttctggtcrcttcacttttattaaagtataatttaggaaagaacacagcttagggaattttcacaaactgagcacacatgtgtaaccagcacccaaatcaagaaataaa

SEQ ID NO: 51184 - DNA, 201 bp, Homo sapiens
tctgcctgctggaatttctcctcaaatatcaaatattgattgcctcccccatctatcatatgtagtagctttatttctcccttaaaacttggctgcagccracacccagttctctgaggccaagcttctacttagaaacgagcttatcaaagcatcgcttcagcaaaggtggtctctcccatcatgaattctagtaagttt

SEQ ID NO: 51185 - DNA, 201 bp, Homo sapiens
ctcctgcgcggaaagcgtcccggtgcacagcgcccagctcccgggtctctgtcggacctgcgactcccggcgcctttctggtgccctccacgccctccacrggcaggggcggagctgaggggcccacacagctccctctgccccaaacggggcagagaatgagtaggtgcctgcagccaggggcgcgcccatcctttcgca

SEQ ID NO: 51186 - DNA, 201 bp, Homo sapiens
caagcttctacttagaaacgagcttatcaaagcatcgcttcagcaaaggtggtctctcccatcatgaattctagtaagttttgctaggggaataaaattgkctttaaatcattacatcagcaaagatgtgggtgggatgcagaaaggagccagtaggaccgtctgtgcctctttcttgatccctggactgcacagtggccc

SEQ ID NO: 51187 - DNA, 201 bp, Homo sapiens
tctcttcatgtgtgaccttctgcaatagggcctggctcctcctctatccataggtagagtctatttattcacccatgtgaaggctctgtaacattttatckggtagaacgtggtgggagtgatactgggccaattctgggcatagccagcccctacctgacctggtagcttctactccttcctcagagaagctaaagaatt

SEQ ID NO: 51188 - DNA, 201 bp, Homo sapiens
aagggggccggccccctaggccccggccactcacaagttgggacaaagtgggtggaggggtagatgcaactgggtgaaccactgtcaccctgtgtgtgagyccaggtcctgcaggaatcagacagcacaggggcttagccatgcaggaggctgactgcagggaggcctgtgatggataaggagagagggcagaaaagcctc

SEQ ID NO: 51189 - DNA, 201 bp, Homo sapiens
attaatgtacagggaataacactgcaataaacatggatgttcagatgtctcctcaacatactagtttcattttctttgaaaacatataaccaataattggrtttgtggatcacagggacattttatttttaatattttggggaacgtccacattgttttccataatagctgtactaatttacattcccaccaacaatgtat

SEQ ID NO: 51190 - DNA, 201 bp, Homo sapiens
cacgccaaagctgcccatcacagacagaaaggggcctgcactggcacccccaccacccactcagtcgttggctggcagtagcacacaggattttgggtctyggcgcacacagggcggtagatccaggaggcagcagccaagactatgaccacaatgctcgtggggcagggggtctgagcatgcattctcacagctgctcct

SEQ ID NO: 51191 - DNA, 201 bp, Homo sapiens
gtgtcctcccgtagaagggtagcccactataggtgagcatcctcccatgggccagtgtcctcctgtagacgggcagcccaccataggtcagcaccctccaygggccagtgtcctgctgtagacaggcagcccaccataggtcagcatcctcccacagaccagcatcctgctatagacgggcagcccaccataggtcagcat

SEQ ID NO: 51192 - DNA, 201 bp, Homo sapiens
ccatcacagacagaaaggggcctgcactggcacccccaccacccactcagtcgttggctggcagtagcacacaggattttgggtctcggcgcacacagggmggtagatccaggaggcagcagccaagactatgaccacaatgctcgtggggcagggggtctgagcatgcattctcacagctgctcctctgagattagccca

SEQ ID NO: 51193 - DNA, 201 bp, Homo sapiens
acctttttcttacatttcattgggtaggatatttaagaatttcctattgatggagcctttagaaataagagtggcaagtcactggaaatttagaacccaayatccctcccctctcagaaaaaaaaagagagagagacacagacagagacagagactgagagattcataagctttcaacgagatgtctgagaatggagtggc

SEQ ID NO: 51194 - DNA, 201 bp, Homo sapiens
tgatgcatccatctacttgccacgcgtggcacagctcccacccctaggcttacgcagtcttctcaggcctgtcctggctgccaggccagcagttccccccmacccacaccgtgctcccagaggactctctgtaatcagcctggacgtgggactcacaccacaaggtcactgccgtgtgtggagtgagttgtctggtgttaa

SEQ ID NO: 51195 - DNA, 201 bp, Homo sapiens
aaagcccccttcagtctcaagactcctaaattgctgagttgcaaggaggcagtgcccagagaatgcagcattcctaagcatcactagtttccattaaaacytaatttatggaattaaaaattaatttcatggaaatgaatttgagcagtcttttcattagagcacacttggtctaaatgagtttggagtggttgtaatagc

SEQ ID NO: 51196 - DNA, 201 bp, Homo sapiens
catccatctacttgccacgcgtggcacagctcccacccctaggcttacgcagtcttctcaggcctgtcctggctgccaggccagcagttcccccccacccmcaccgtgctcccagaggactctctgtaatcagcctggacgtgggactcacaccacaaggtcactgccgtgtgtggagtgagttgtctggtgttaagtgag

SEQ ID NO: 51197 - DNA, 201 bp, Homo sapiens
ctgaacagaaagacaaataccaggagtcctcacttataagtgggaactaaacattaggtacacatgggcataaagatgggaagagtagacaatggggactrctagaaaagaggaagagcagggaaaacaaggactgaaaaactgcctattgggtactatgcttactacctggctgatgggatcattcataccctaaacttg

SEQ ID NO: 51198 - DNA, 201 bp, Homo sapiens
ttaagttatgtacagtctgtttatggaaaatgcataaactcattacttatacattgataacactaaaataagtgaatgtacagaacgctatgtttaacgcrggcataaaaaagagaatattgaagaaaataagagtgggcaattgaaggctgcttttccatacatttcttgaggtcagaaaacatgtgttttcctgcccag

SEQ ID NO: 51199 - DNA, 201 bp, Homo sapiens
ttgtctagactcaacaagttcttaaccttattacagtcttacaaatgacggatttgttatctagggaagaaaaagccctcttctgggactctgagacaaargatttatttgtacccacctgagacgtgctcagagagggactggaggtgcatggagagggctcctgtcagaatcttcaatccgggggaggccagctgcctg

SEQ ID NO: 51200 - DNA, 201 bp, Homo sapiens
catttcttgaggtcagaaaacatgtgttttcctgcccagaccatcctcaggaactggcccggggtttgagaacatagtggatgagctgttcagggggcagrtatggaattaatgcagacacgaaatggtacggttgagaggctgaaagtcacatcgaaatctatgactacaatggatgccattggtgcccaccaagatccc

SEQ ID NO: 51201 - DNA, 201 bp, Homo sapiens
tgaggatctagcctttcacaggatcctctgcaaggcagtgcagtaaggaggggaagggttttctgccacgtctgtggtctcttcattcttctcttcctgcygtcattctcgacctgggccctgctgtccttctctcatctggtatccattagagttcttgattacaagcaacagaaatggattctgcttcacttcaaccag

SEQ ID NO: 51202 - DNA, 201 bp, Homo sapiens
acacagaacctgatggattggaagtaattcccccaaatacactggggagatttgggaagaggaaaaaaaatgttgggctacaaaatataatagtaatatcyagcagcacccttttatatatgtgcataatccttgagtttgtacatgttcagagactggccacaactgttgcatgataaattagtctttgtccaagtgaaa

SEQ ID NO: 51203 - DNA, 201 bp, Homo sapiens
tgaaaaaatggcacatgagatcacatgtcattggccaaaatcagtcatccgccattctaacttcagagtgggtggagaggtgtgtagtcttaacatgtctytagaagaaagagcacagtaaattttttaaagagccccaatgacaatcatacaatgttttagcaatatcataacagccactgatcactgtgggcttttgcc

SEQ ID NO: 51204 - DNA, 201 bp, Homo sapiens
aacagaatgtcatagactgggtaccttataaacaacacaaatttatttctcactcttctggaggctgggggatccaagatcaaggtgccagcaaattcagygtctggcaaaggcccacttcctggttcatagatggcacctcctcactccgaactcacatgctagaagggatgagggggtctctaaggtctctttcataag

SEQ ID NO: 51205 - DNA, 201 bp, Homo sapiens
cctaagaggagaggttggaattaatacaacttggaagtctcagaggtgggagtgtgctgggacccagaccaaggaggggcatcagcaggctagtgcaggtrtctctgcagagactgcgatgaggctggtcctgcaaatgctgggaaaatggagaactggactcagctgctgctacaggaaggaactgccactgccagggtg

SEQ ID NO: 51206 - DNA, 201 bp, Homo sapiens
agttttggagttccttcccctctgtatcttacttcacttccttgctcgcaggttgctcctgagagccctccctcaatgagtctggggcagccgaatctctrcctcaggctctgcttctagggaacacctcccacaaacactgcctcaaaatttaccccattaggtttccctttttcctttggctgccaggaagcttagaac

SEQ ID NO: 51207 - DNA, 201 bp, Homo sapiens
gtggccaactttggtacacaggctggatctaacccccagacttgctttgcaaagacagtttccttgggacacagccaggcccttccaggtctttgtgacaytctgggcacctccaaccacagctgtcacgggtcccaggggaaggaagcacatagggcaccaaatgaaggggctcatctctcagaatcaggcttttctgga

SEQ ID NO: 51208 - DNA, 201 bp, Homo sapiens
gtgtgatgactgagccacacgccatttgtctctgtgttgaagaaacagaggcctaggtagcccaaataaattggtttctcgtaagaatgcaccaggagggscttggcatagtggctcacgcctgtaatcccaacactttggggggctaaggcgggtggatcacctgaggtcaggagttcaagaccagcctgatcaaaatgg

SEQ ID NO: 51209 - DNA, 201 bp, Homo sapiens
tagtgcctgggaccagacagacatcctgatccaaggtggctgcaggatgccagccccaagaatgtgtggaaagccacaggagggctctgcggtcacggggytaggccacactcaccctgtttgcttctccccggtttcgtggctccggctctccaactcacccttccccttccttgaggcttatgcttagaggtgtttcca

SEQ ID NO: 51210 - DNA, 201 bp, Homo sapiens
ctgctccagctgccacctgcccttgatgctttcagggaaattttggctcaaaattaggggaaacaccccaagatgagcctccaaaaccaagaagtgtggtwctgttgggaaggtttggaacttgcagggtcagaggccagtcagaaggtttctaacaaaacccctttctttctcctctgaggacatcaaagggtagttgtc

SEQ ID NO: 51211 - DNA, 201 bp, Homo sapiens
tcagaaggtttctaacaaaacccctttctttctcctctgaggacatcaaagggtagttgtctatattcacagtcttcttaggcatctgatggagtaatttyttctgagctgttgaattctttcaaaggtctgaacagaaatataagactgtatgcccctgtattaatctgttttcatgctgttggtaaagacatacctaag

SEQ ID NO: 51212 - DNA, 201 bp, Homo sapiens
caagagaacagcatggggaagactcgcccccatgattcagttacctcccactgggtccttcccacaacatgtggaaattcaagatgagatttgggtggggrcacagccaaacggcatcagcacctcttctgttgtgggttcaattgtgtccccaaatattcatatgttggggtcctaatccccaatacctcataatgtgac

SEQ ID NO: 51213 - DNA, 201 bp, Homo sapiens
atgacaagtttcccaaccagagtcctaagttaccccaagactgtggaggacaacttttctaagtcaaggaaagatctcacactttaaggaattcaccactyttacattaaatacaaggatcccaaaaacacaattatgagatgggaaacagagtcctcgaagtgaacatcatggtgacagcagctaaatgtccattgctac

SEQ ID NO: 51214 - DNA, 201 bp, Homo sapiens
ggtaatgattaaaaggaagagaacaaagaggagatggataagagacttttatcggggcatgcactgtttgccatagatcccaccattcccagttgtctgayggctgcttcacacaaacatcacctacctgactccttagggatttgaagtttgcacctcctacatttgcttagtaaatacttgagagaagcagtgaggagt

SEQ ID NO: 51215 - DNA, 201 bp, Homo sapiens
accagttgacctagtgaggacaaatgtgcaaatgtcgaagatgtttgtgaatagtttgaataaaatttgccaaagatgttcatgaataatttgaataaaakttttcatgaactacgagtgcagaaaggcaatattcataaatcaatacattgtttcatgtgcaatttaaaatgtgtttattttaaaattcatattttaata

SEQ ID NO: 51216 - DNA, 201 bp, Homo sapiens
catccataaaacagcttttcagtaacaggattggagcttggggaaatttgactttattgctgctttcagaatgaacccttgtaaagtagcctttgataacyttttattacagacatcccttacatgttattcaacctgcgtgcctaccaaagacttagcagagcttcattttctatagtttgtgatatgaaaaccaatggg

SEQ ID NO: 51217 - DNA, 201 bp, Homo sapiens
cctcaggaccactggcactctctcaaggaaacccatgcagattttttcttgtaaaaccaacgcttacagtctttagggagaagcccagcgggtggtatggsgctggttatggaatacaagtgcctagtgggccacttcttgtcagcagaccttcaagaagcagctagctaccacctaagaggagaggttggaattaataca

SEQ ID NO: 51218 - DNA, 201 bp, Homo sapiens
caactgggaaatctgtgacaactaagggaatatttggtgagcattagagtctccactacagagagtgcttgacattcccttaaaacatgttcttaagaacmgatttaacatggcaatcactcttcatggatggtaccatgaacattattacaaactggctgtaccttaccccatagaccacagactattctagaaaaagac

SEQ ID NO: 51219 - DNA, 201 bp, Homo sapiens; identical to SEQ ID NO: 8723

SEQ ID NO: 51220 - DNA, 201 bp, Homo sapiens; identical to SEQ ID NO: 8727

SEQ ID NO: 51221 - DNA, 201 bp, Homo sapiens
tttgagtcatatactgttcatcatatactgcaactaattttgtttaactaggaaattcagtttaccagatttaattcaccctcaagtataaatccaaaaaytttaaattaaaaaaaatcgatttactaatcctcagaaaaagtaaacaagttaatcatagttgttactatgctattagttgatagaaaatttttaaaaatt

SEQ ID NO: 51222 - DNA, 201 bp, Homo sapiens
ctccaagcaggacaactgtgtggtggcgtagatgctccaaagccagcatggcctgtgacccccaggcacaccccagtgtccaaggcttctaggaaaatgtrtgattcttaacacaagtttgtgtgtttgtccctactcccacctgtctttcggctttccaaggtgcatggaatatgtctttcagtctccctccatctctcc

SEQ ID NO: 51223 - DNA, 201 bp, Homo sapiens
aatcgcttgaacctgggaggcggaggttgccatgagccaagatcatgccactgcactccagcctgggcaacagagtgaggctgtctcaataaataaataartaaataaaaggagtagataatcccctgctccacattgtgcgggggttcaaaatagcgtgatttatccactcattactcattatcttcccttccaggcaac

SEQ ID NO: 51224 - DNA, 201 bp, Homo sapiens
accagtctcccctctaaataagagttgtggaggtgatacccacatattgggttgtcttgactcaacacatctcagaatctctccgtggattttagatgtasagaaacatgttttaatagcctgcccttctagagagactttagctgagcatgttgattctttcctcttcgggaatgccttctttcccccaagaaggaaaaa

SEQ ID NO: 51225 - DNA, 201 bp, Homo sapiens
tcctgaggcaagatttgggatcaagtagtttattgggaaggtgaagagaataccagtgatgaatgggaggtgtggcaggaaagagacagggccagttaagkgtatgttatcctgccagtcatcgctgtcagcaactggagcttaatgccactgggaaacttcagaaaaccacaccaaaacttgagaacacaccccaaaggt

SEQ ID NO: 51226 - DNA, 201 bp, Homo sapiens
gttgggtttacagttacagcatttttcacgttgtatatgggaagagggtgacagtcagaggcccctgaattaccagagggttcaataattgacttctgtcytagttttagatctcctagaagcagatcctgaggcaagatttgggatcaagtagtttattgggaaggtgaagagaataccagtgatgaatgggaggtgtgg

SEQ ID NO: 51227 - DNA, 201 bp, Homo sapiens
tcacccatctgggtctgccagcaaaaagctctactgtgcattattgacccaattatatacaaaggctacacagagatgaaacagttgagcctttcccatcygaagatcctcaaagaacagaacactatgttccttaaagtgaggttttgaagcagaaatgacagaggaaaccaagaggagccagcctgcttaaaacctgag

SEQ ID NO: 51228 - DNA, 201 bp, Homo sapiens
tgacccaattatatacaaaggctacacagagatgaaacagttgagcctttcccatctgaagatcctcaaagaacagaacactatgttccttaaagtgagghtttgaagcagaaatgacagaggaaaccaagaggagccagcctgcttaaaacctgagttgtcttttgtgggctcattaaatatcaacataaaaacaatgcc

SEQ ID NO: 51229 - DNA, 201 bp, Homo sapiens
ctcaaagaacagaacactatgttccttaaagtgaggttttgaagcagaaatgacagaggaaaccaagaggagccagcctgcttaaaacctgagttgtcttktgtgggctcattaaatatcaacataaaaacaatgcctcaatgttttttgatgtgtgagacatttttaagtggatgtaaaaccttcctccagaggccaagg

SEQ ID NO: 51230 - DNA, 201 bp, Homo sapiens
atagtaaacaatatttcaaaccaagtggaacccttcagcgcagtgggtggccaactttggtacacaggctggatctaacccccagacttgctttgcaaagwcagtttccttgggacacagccaggcccttccaggtctttgtgacattctgggcacctccaaccacagctgtcacgggtcccaggggaaggaagcacatag

SEQ ID NO: 51231 - DNA, 201 bp, Homo sapiens
gagtcttcaatgcaatttatggtccagagccccctgtgggccaggccaagggaaagctttacccaagactacatagttttggagttccttcccctctgtaycttacttcacttccttgctcgcaggttgctcctgagagccctccctcaatgagtctggggcagccgaatctctgcctcaggctctgcttctagggaacac

SEQ ID NO: 51232 - DNA, 201 bp, Homo sapiens
cactgacccatccagatgacaaagcctggagagaggcatgtgaccccgtcagcgaagttttgagggtagtgatggagagacagcacacccaacccaatggyggctactgagatccccctggagaggcctttgtggatggccaaacggggaccggaggcctaggagcaccagctctgcgggggcagcgccagcaccttcacc

SEQ ID NO: 51233 - DNA, 201 bp, Homo sapiens
cgggatgagatcacctttgattgaagattttgaaaaatatttaaaaaccacactgttgaccattgtgaaaatgccgtgaaatttctctaccagctatgaaktgctttcacatattattatcactattattattggccaatgaatctcataacactgcagataaacatattttatctgagcttttcaataaacaagtaaaaa

SEQ ID NO: 51234 - DNA, 201 bp, Homo sapiens
atgcagcctgacacctcaaagacgcgactgggcttctgtgaagcccaatgacagctagggcatcacagcaacgttttgaggttccagaaaccaagaacagmcatccaaagattttgagcaagggaggctcctttctttcttttcccactcccttagccccagcttggctcccctgtgaccacgtacgctggttctaactac

SEQ ID NO: 51235 - DNA, 201 bp, Homo sapiens
gtcagtttcccccatgcggttctcatgataatgagtgagtcttacaagatctgatggttttataagcatctggcatttcccctgctggcactcatttactycttcctgccaccctgtgaagaggtgccttccaccatgattttaagtttcctaaggcctcccaagcaatgctgaactgtaagtcaattaaccctctttcct

SEQ ID NO: 51236 - DNA, 201 bp, Homo sapiens; identical to SEQ ID NO: 8730

SEQ ID NO: 51237 - DNA, 201 bp, Homo sapiens
ttcatctttggcataggtttccaatgttcctgggcttttttgcatcaaactacttgaggggaaagagagtgaataattgcccaagggtaatttttatgggmcaggttaacaaatagcatttacccatctgctcacatatttgccataactcagtcacatggccacatacaagtgcaagggaggatgggagccttactgcag

SEQ ID NO: 51238 - DNA, 201 bp, Homo sapiens
ccccgccccccagcagacagccccacccacagtgctggctcttgggtcatggcctccctttgtccttcagctccagggccaccctctaatccatgggtgamttcccatttcccttttgggttttaggctttcctttaacacctattccctggataaaattccctctgttgacctgccaagtgtggcaatatttgcctggct

SEQ ID NO: 51239 - DNA, 201 bp, Homo sapiens
tagatgagtggcatacctttcaaccatgccaagatgttgagtggccttgacatctgtccattgtcaagctgcctgctgctctcaaggtctgcagcccacgytttgtcaataatcttgcagccctgctcattttaggtcaatgtttggtgatgcattgcagatctgtattccattactgtgctgttgtccataaaaatctct

SEQ ID NO: 51240 - DNA, 201 bp, Homo sapiens
cgttgtatatgggaagagggtgacagtcagaggcccctgaattaccagagggttcaataattgacttctgtcttagttttagatctcctagaagcagatcytgaggcaagatttgggatcaagtagtttattgggaaggtgaagagaataccagtgatgaatgggaggtgtggcaggaaagagacagggccagttaagggt

SEQ ID NO: 51241 - DNA, 201 bp, Homo sapiens
ccagctactgaagaggctgaggcaagagaatcacctgagcccaggaagtcgaagctgcagtaagccaagattgcaccactgcattccagcctgggtgaccraggagactctgtctcaaaaaaaaaaaaaaaaaaaaaaaaaaaaaaaagaataaataaatataaataaagtggacttttcatggttggatctggtagttcc

SEQ ID NO: 51242 - DNA, 201 bp, Homo sapiens
caacagcccttcatgctaaaaactctcaataaactagatattgatgaaatgtatctcaaaataataagagctatttatgacaaaaccacagccaatatcawactgaatgggcaaaaactggaagcattccctttgaaaaccagcacaagacgaggatgccctctgtcaccactcctattcaacatagtgttggaagttctg

SEQ ID NO: 51243 - DNA, 201 bp, Homo sapiens
tgttccaaagagaattttgaggcatgaaatatgtagcctttatggaggcaggatttactttgactcatacagagaaagaaaatgtgtgtgtgtgtgtgtgkattttcaatccttgcatgtgatatttttaagggctggtgcgatagctttgcttgccccaagaggatgtcccagacagtgcactagttgatgctgcagaaa

SEQ ID NO: 51244 - DNA, 201 bp, Homo sapiens
aatccatcacataaacagaaccaatgacaaaaaccacatgattatctcaacagatgcagaaaaggcctttgacaaaattcaacagcccttcatgctaaaamctctcaataaactagatattgatgaaatgtatctcaaaataataagagctatttatgacaaaaccacagccaatatcatactgaatgggcaaaaactgga

SEQ ID NO: 51245 - DNA, 201 bp, Homo sapiens
aaattagggatggatttcttaagccactaaaccacatggaaaaataaatgattaataaagctggctacattaaaattaaacacttttgtacaaaaaaaaaagtcacaataaataaatttggaagacaagccacagactagaagacgtgcagcaaattttatggaaaaaaaggcttaatatagaaaatttgtaaagaacagc

SEQ ID NO: 51246 - DNA, 201 bp, Homo sapiens
gtgtaactgctgcaaagcttatgtggttttgcaaacccaaatgagagcttttcaattgcccttggagtttcttgatgctttctgaggtccaagggtctgakggaactcagcagtgctcatagtccctgattttacccttggaacgactactgggcaacaagacaggccaccattcaggagaaagcagggctcctgctgaga

SEQ ID NO: 51247 - DNA, 201 bp, Homo sapiens
tatactaggggcctgaattatgaagtgtgaaaaatccagtccctgaccttggggggttcacatgtaagtatataattacattataatatgcttagtgctarcctggaaataaaacaccacccatataggaatgcaatagctagaaaaagcaagtcagccctaaaaaattagagaaagaaagatacttaaatgcatttaaag

SEQ ID NO: 51248 - DNA, 201 bp, Homo sapiens
tacaaggctacagtaaccaaaacagcatggcactggtaccaaaacagatatatagaacagaacagaggcctcagaaataacaccacacatctacaactgcytgatctttgacaaacctgacaaacacaataaatggggaaaggattccctatttaataaatggtgctggcaaaactggctagccacatgtagaaagctgaa

SEQ ID NO: 51249 - DNA, 201 bp, Homo sapiens
tacctatgtgcatctccgtttttgctaaatccaaattacaccttactatactgttaacttttatttgtctatatcatttgttggaatccagaaaacatacwttgtttctttccaggaaaaagtcaggtataaaaataagtgtgtgttgaaatataagcacattttaaaaagaaattagctcctattctcattcctgcagct

SEQ ID NO: 51250 - DNA, 201 bp, Homo sapiens
atttttaattattcaattgactagtatttgtttcattgaacttagtcagcattcaagaaagccgtattgttcccactgtgcaaaatgctatactaggggcytgaattatgaagtgtgaaaaatccagtccctgaccttggggggttcacatgtaagtatataattacattataatatgcttagtgctagcctggaaataaa

SEQ ID NO: 51251 - DNA, 201 bp, Homo sapiens
gacactaaaataacccaatggggcgtgtgatcaccttgattacatgttcccaaagaaatacttttttaataccaaatatttttcaaagtttttataaagcyttccatctactcaatggtaggtcatatctcaattaactattgctacgtaacaaatgtaacaagtgtctccaaagctcagaggataaaaacaacaatcatt

SEQ ID NO: 51252 - DNA, 201 bp, Homo sapiens
tgctgctcctgacctccatcaccagaagagacccccaagagcaaatcatatttttgtttccaagagggcccactgacaacactaaaacccaggaggaagcrgttgacttaagaccttcgagtgactcactttgtaggaaaagcagagaaaggctggcaaacaagaaaaacataagctcatttttctccccctcatcaacct

SEQ ID NO: 51253 - DNA, 201 bp, Homo sapiens
ccttttgcatcttcttagttctctacttgttttccttgcctgcccctactccatgaaaaatatgggtgtgaattaaatcagtgttccttaaactgtgttaygctggagtccttgggttttcttccagaacgttgtgaataataaagatattagttaggataaactagattacgctgcagtaacaaattaacttttaactcc

SEQ ID NO: 51254 - DNA, 201 bp, Homo sapiens
tttgacctttctggaagagtggacatggcttcccagatcaggagctctccgtgcccaatccagctccccatccacccctgctgcccttttccagagattgmactgaactaagaggggaaaacatgaatctgtaggcacatgagctggaccatattttgaacacaaatagtgaagccaagagacccaagtgaaacagtttct

SEQ ID NO: 51255 - DNA, 201 bp, Homo sapiens
aatttgtactatatgaaatcggttctatgaagcagtcttgaaaaagactttatcataagttatttttagtttgttcagagtgataaatgcatgggtgacayacattttaaagaaaactaaatgatggtggaaacataggcaaaaacaaaagcatggacatgaaaagaaccaattgcagctgaaaaatacagcctgtggaat

SEQ ID NO: 51256 - DNA, 201 bp, Homo sapiens
gtctaagaatctgtagatgcagagagactggagaccagaagacaaagacagcctcatgtgcatgaacttagccaagttgcacactggcttgctgactaatytgtcttatctccttatctctgtgaatgcagatccctgaaacactgttgtagaaactggttgtcagaaacagaactaaggagtcaattgaaacaatcatag

SEQ ID NO: 51257 - DNA, 201 bp, Homo sapiens
cttccttaatgttcagtgtagactgttacccaaggaattaagcattagtcatcaaaacttcattgcaaaggcaacaaaataattggggttcctgagttatcatccatttcaacattcagaggccaatttgaccccagacaatacaaggtctttcttcttgttataaaagtggttgcagagttctgagggttctctgctgta

SEQ ID NO: 51258 - DNA, 201 bp, Homo sapiens
attgacagtcaaaataaatgcaacgtaagcaactgaagcagggtgtttctgcctgccaatgcttgcctctgtcagataagaagaaggattaacaagtatasggaggtgttaaagccatgggggcacttagcagagactttgtcactggcataataaggattgcaggagcgttttgcaaggagccacagtcctgccgtgcga

SEQ ID NO: 51259 - DNA, 201 bp, Homo sapiens
ttttatatcatttctggccaattttacacagttttagttatttaaaatgtagctatatgagattcaacatttaccagcatttcatatttggaaactatttwagaaatgaagtggccaggcgcagtggctcacgcctgtaatcccagcactttgggaggccaaggcgggtggatcacaaggtcaggagatagagaccatact

SEQ ID NO: 51260 - DNA, 201 bp, Homo sapiens
tctgcagagactctcagagcagccctaagagggggccaggccaggtgggtttggtcctattcaccttcctttttaaaccaaagcacacagatttacacacygggcttcgggatgagatcacctttgattgaagattttgaaaaatatttaaaaaccacactgttgaccattgtgaaaatgccgtgaaatttctctaccagc

SEQ ID NO: 51261 - DNA, 201 bp, Homo sapiens
cacccaggctggagtgcagtggtgtgattatagctcactgcagactccagctcctcaaactcctgggctcctcccgagtagctaagactataggtgtgccycaccacgccaagctaattttttcttttgtacagatgggggtgagtgggcctctcgctactttgcccaggctggtctcaaactcttggcctcaagtgctcc

SEQ ID NO: 51262 - DNA, 201 bp, Homo sapiens
gtgcagtggtgtgattatagctcactgcagactccagctcctcaaactcctgggctcctcccgagtagctaagactataggtgtgcctcaccacgccaagmtaattttttcttttgtacagatgggggtgagtgggcctctcgctactttgcccaggctggtctcaaactcttggcctcaagtgctcctcctgcctcaagg

SEQ ID NO: 51263 - DNA, 201 bp, Homo sapiens
gggctctcaggtatctcagtgactccccctggagaaggtgaggcttgggtaggggagggagtttcagtaaacattcccctggggattctgaaacacccacytagtgggtgctcccatctcccaaaccccatcactggcattccagaggcccttttcactggtctacaatgccaaggtctgccgtgtcttttgggaatgaac

SEQ ID NO: 51264 - DNA, 201 bp, Homo sapiens
ggtccctgaatatgaatgagagacttgctctcagcctgtggccaccctataatgttaaaacagtcagaagattaatacacatccactctgaggttcttgcrcagcacagagggagcccatgaaggtgataagagctgcaaagaggaagagggttcaaggcacagctggaagtgccatgcaccagccctggcaaaatccagg

SEQ ID NO: 51265 - DNA, 201 bp, Homo sapiens
tcactcataggtgggaattgaacaatgagaacacttggacacagggcggggaacatcacacaccagggcctgtcagggggtgtggcagactgggggagggrtagcattaggagaaatacctcatgtaaatgacaagttggtgggtgcagcaaatcaacatggcacatgtatacctatgtaacaaacctgcacgttgtgcac

SEQ ID NO: 51266 - DNA, 201 bp, Homo sapiens
tgtagagacagggtctcactatgttgcccaggctggtcttgaactcttggcctcaagcaatcctcctgcctcagcctcccaaagcaccgggattacaggcrtgagccaccatgcctgaccaaaattgacggtctttgaattaggatccagaacaagggttaacaacatttaaaaatatttgtctttaaatattctgatgcc

SEQ ID NO: 51267 - DNA, 201 bp, Homo sapiens
acaaagacacatgaagattgggagtggacatattactgtggaattgctctttgttttcctttctttcttttctgaaatatttttgggggccaggatgaggrgccttaggatttatttttctgcattagaacatgcactaaaggtgagccagttttctttaattcagttcaacaaatacttttgaacaagacttagtgtggt

SEQ ID NO: 51268 - DNA, 201 bp, Homo sapiens
ctctcaataaatgcagaaaaaacttttaataaaatccatcatgacttcaagaaaaaaaccctcaacaaactaggcattgaagaaacatacctcaaaataayaataacagccagctatgacaaacccatagtcagcatcatactgaatgggcaaaactggaaggattccccttgaggacagaaacaagacaaagatgcctac

SEQ ID NO: 51269 - DNA, 201 bp, Homo sapiens
tcccctttgctcccctttctcctggcccctcccaccccagcacagtcaatgctaattaacagctgtttaattatcagcccagcagggaagtgatcatggcscaggtcctcagagagttatatgcacagttaagttgtcccagatactggaagattgactgtgttatgtgcccatagggagaggcaatgcggcttagtcgaa

SEQ ID NO: 51270 - DNA, 201 bp, Homo sapiens
taggttcaagcaattctctgcttcagcctcccaagtagctgagattacaggtgcccgccaccatgcccagctgatttttgtatttttagtagagatggggyttcaccatcttggccaggctggtcttgaactcctgacctcatgatccacctgcctcggcctcccaaagtgctgggattacaagtgtgagccgccgccccc

SEQ ID NO: 51271 - DNA, 201 bp, Homo sapiens
tatatatatggcttcaaatctagatagttgtgtattcatagtatgttcacaacatgttcaattcatctggcccattctctcacttcacacctgaagaagcrgagacccagaaaggttaaataacttgcccaagtaacacagcttgtcagtgttacttaccagctcaagtcacttgtgcctggaatcatttctcccagcata

SEQ ID NO: 51272 - DNA, 201 bp, Homo sapiens
agaaaaaatgttagtttctattctgcattgtagtagattttaaaaagatttccattgaaaacatctactttttaacatttggtgctaaatttgtaagttcytgtttccgaaaaaaattcacttaagttgactaatttatttcctgataaatattacatgaatatctcatatgaatatatttctttaaaaatttaggcacct

SEQ ID NO: 51273 - DNA, 201 bp, Homo sapiens
aaccctccactctgaacttttactcttctttcttgcagaatcaatccctccagcagccctcaactaccagaagcacaaaaattcaatatatttttttttttgagatggagtctcactctgtcgcccaggctggagtgcagtggcatgatctcggctcactgcaacctccacctcctaggttcaagcaattctctgcttcag

SEQ ID NO: 51274 - DNA, 201 bp, Homo sapiens
tctcatgacatgatagggaatgaagtgatgatggctcacagcactgctggggctgcttttacaagaagctcactcaaagtcaacttattttttttttttttgaaacagggtctcactgtgttgcccaagctaggatgatacagttgcacaatcatagcttgctgcagcctcaactcccaggttcaagagatcctcccgcct

SEQ ID NO: 51275 - DNA, 201 bp, Homo sapiens
aatagataccgtctacccctaaaatctgccatgtacagctcaggttgggcacagcacaccctgagaactgctggacctggatgtgcttgtagtcaagggtyttggaaggaacagccgtggtcatcagttcacacagccaggatacaggggatatgcccttatgtgacatagggcatatatgatatagagtatatgtccaca

SEQ ID NO: 51276 - DNA, 201 bp, Homo sapiens
tatctgtgtttttcggttttctaaatttactctacattttctttatattaaaaataaaataataataataaatattctttaagaaatatttgagccacacygaggttctatgtgatctaaaaatctcagattggccccatctatgttagaaaacttttctatcaaatcaaccacatctgcttcccttttcttccaaacact

SEQ ID NO: 51277 - DNA, 201 bp, Homo sapiens
gaaacagatccaaatcatattacatgataatgtgatagaagataaataggtagtacaattagaaaagatggtcagaaaaggcctctccaaagagcctacayttgggctaagacttgaatccccccaaaaaagaactaaacatgcaaagatctgagggaagagcattccaggcggaagtgcaaaggtcccgaggacagaaca

SEQ ID NO: 51278 - DNA, 201 bp, Homo sapiens
agagaaatgccagttgatgctttaaaaatgtcaagatttctacaaatctcttttagatcagtgctctgatgagccatccatctcactgtcacaaagctgtmttgggcagctgtctctccgctctggcagtgcagcccaccttcacacctccacacagaagggaggtgcaagactgggagctgtgtgatggggcactcaccc

SEQ ID NO: 51279 - DNA, 201 bp, Homo sapiens
aggctattaaccacttcgattaatcactcacaagcggtcacaatgatcctatactacatggcagctttattggggagttttgacttgttgcttgcttgattattaataactcgcaaatccatctctcctcccgtggagagttggtagttggctaacgaagtatgagaaccatgtgttgtctcccacctcttctccctgccg

SEQ ID NO: 51280 - DNA, 201 bp, Homo sapiens
actttaccaacaaaaaatatattatctgtgaataaaaccatggccaaggctattaaccacttcgattaatcactcacaagcggtcacaatgatcctatactacatggcagctttattggggagttttgacttgttgcttgcttgattattaataactcgcaaatccatctctcctcccgtggagagttggtagttggctaa

SEQ ID NO: 51281 - DNA, 201 bp, Homo sapiens
cgcttggagttatgtttgtgagatccagtcatgtttaatgtgtacttacagcttttctcattgctgaagagtgttccagtgtatgactataacacaattcstttattcattctacctgtgggacaatctaaggacttgattttccgctgagtgaggtggattttgccacttggagggatttgtgtatggggttccctacac

SEQ ID NO: 51282 - DNA, 201 bp, Homo sapiens
tccatacttactagaatcatacactatgtcctgttttacaactagattatttcgcttggagttatgtttgtgagatccagtcatgtttaatgtgtacttayagcttttctcattgctgaagagtgttccagtgtatgactataacacaattcgtttattcattctacctgtgggacaatctaaggacttgattttccgctg

SEQ ID NO: 51283 - DNA, 201 bp, Homo sapiens; identical to SEQ ID NO: 8748

SEQ ID NO: 51284 - DNA, 201 bp, Homo sapiens; identical to SEQ ID NO: 8749

SEQ ID NO: 51285 - DNA, 201 bp, Homo sapiens; identical to SEQ ID NO: 8750

SEQ ID NO: 51286 - DNA, 201 bp, Homo sapiens; identical to SEQ ID NO: 8751

SEQ ID NO: 51287 - DNA, 201 bp, Homo sapiens
ctccttgagaagagggttgtttgtggatagctgttgacatgcactaaagaaatgagggactcctcttagtgatcaatcatctctcacgcaaaaattcactstcttcatttgtgttcccctttctgcataccccgggtctccctgcttccctttacagacaccccagaatcccccattcatcttccttgacccttgtttagc

SEQ ID NO: 51288 - DNA, 201 bp, Homo sapiens; identical to SEQ ID NO: 8752

SEQ ID NO: 51289 - DNA, 201 bp, Homo sapiens
gtaggtggatcatgaggtcaggagtttgagaccagtatggccaacatggtgaaaccccgtctctactaaaactacaaaaattagctgggcatggtggcgcrcgcctgtagtcccagctactcaggaggctaaggcagaagaatcgcttgaacccgggaggcagaggttgcagtgaaccaagatcacgccactgcactccaa

SEQ ID NO: 51290 - DNA, 201 bp, Homo sapiens; identical to SEQ ID NO: 8753

SEQ ID NO: 51291 - DNA, 201 bp, Homo sapiens
tcaatagggcagtctgaggccatagttccaggcagagggatgggggcacaggcagcagagggtgtggtagatgaagggaaggagaggacagccagtgtggragaggggaggtggaaaccctctaagggaagggctggatgagccagttcctagaccttactcagcagtatccaaggtggcagggcctaaggataccttctc

SEQ ID NO: 51292 - DNA, 201 bp, Homo sapiens
tcttcctgatgtgactggcttcctgtaaagcaggctactcactcttttgagaatgtttctgtttagaattactcatgtcatggcttcctccatttatcccyaatgatgaaaatcggcagttttaccacttagtactcctaggagctttggtgaaaggccagatacagggatgacagaggatgaaattaatgactgaacaga

SEQ ID NO: 51293 - DNA, 201 bp, Homo sapiens; identical to SEQ ID NO: 8754

SEQ ID NO: 51294 - DNA, 201 bp, Homo sapiens; identical to SEQ ID NO: 8755

SEQ ID NO: 51295 - DNA, 201 bp, Homo sapiens
tcaattctcaagtaaatagaagggaacccttgaattcccctttggcccaacccacgctgtatggggtttggtcttctgacaccatcgttcatttcccccayagctgcatctgcagccctgtgctgccagatctgcctgatcctggcaccatggctctgcctcttaacaaaggccctggccccaggcttctcttgtccaagc

SEQ ID NO: 51296 - DNA, 201 bp, Homo sapiens; identical to SEQ ID NO: 8756

SEQ ID NO: 51297 - DNA, 201 bp, Homo sapiens; identical to SEQ ID NO: 8757

SEQ ID NO: 51298 - DNA, 201 bp, Homo sapiens; identical to SEQ ID NO: 8758

SEQ ID NO: 51299 - DNA, 201 bp, Homo sapiens; identical to SEQ ID NO: 8759

SEQ ID NO: 51300 - DNA, 201 bp, Homo sapiens; identical to SEQ ID NO: 8760

SEQ ID NO: 51301 - DNA, 201 bp, Homo sapiens; identical to SEQ ID NO: 8761

SEQ ID NO: 51302 - DNA, 201 bp, Homo sapiens
tggaatcatcacccagtggaatggctggaatactgttaaccaaggaaagaggaggataattaacagacacctatagccaatctttctgtgacattgtcagmctttggcagtgagcctgcaaaatactcatccagcacacataagcaattttagtactatcataatctacatttgcactgtaattaataaaacccaatttta

SEQ ID NO: 51303 - DNA, 201 bp, Homo sapiens; identical to SEQ ID NO: 8762

SEQ ID NO: 51304 - DNA, 201 bp, Homo sapiens; identical to SEQ ID NO: 8763

SEQ ID NO: 51305 - DNA, 201 bp, Homo sapiens
cctggatgacagagcaagactccacctcaaaaaaaaaaaaaaaaaaaaaaaaaaaagaatcaaaggaggcatgcttcaagcagaaaaagaagccagacgcrgtggctcatgcctgtaatcccaacactttgggaggctgaggtgggtgcatcacttgagatcaggagttcgaaaccagcctggccaacatggcaaaacccc

SEQ ID NO: 51306 - DNA, 201 bp, Homo sapiens; identical to SEQ ID NO: 8764

SEQ ID NO: 51307 - DNA, 201 bp, Homo sapiens; identical to SEQ ID NO: 8765

SEQ ID NO: 51308 - DNA, 201 bp, Homo sapiens; identical to SEQ ID NO: 8766

SEQ ID NO: 51309 - DNA, 201 bp, Homo sapiens; identical to SEQ ID NO: 8767

SEQ ID NO: 51310 - DNA, 201 bp, Homo sapiens
gcacatctagaactagcccagtggcagtaggcaggatggggaaatggagagagaagatgaacgttactggctgtgggcccagcctggacccagaaccagasgccaccaggggctgtgacagtccacctctccagctgggcggggatgggagaaatcagcctgggacagcagcagagggtggtgccactggctctgcctgac

SEQ ID NO: 51311 - DNA, 201 bp, Homo sapiens
gagtgtctgggagaaagggtagcactagagctgtgggagggatctaagggaaagtctcatattgcatgaccatggggggccctggcagaaaggtaagagtscaccttggaaagaggtgaagattagggtactgaatctaagtcagaccaaaacaactctagtgacctgatcaggtttctatctcctattcttctagatttc

SEQ ID NO: 51312 - DNA, 201 bp, Homo sapiens; identical to SEQ ID NO: 8768

SEQ ID NO: 51313 - DNA, 201 bp, Homo sapiens
ctgaaagtcctcaccatccctggagaatccacgtccctatcttgctgtatcttctttatggtccctgaaccagcacggggagctttctgaacgccccgtayaaatctcaaatctctgaatgccagtagccaaccactaagtgaccttcgtggctaccagctcctaagtcctcacctccttccccagtgctgtgcctgtggc

SEQ ID NO: 51314 - DNA, 201 bp, Homo sapiens; identical to SEQ ID NO: 8769

SEQ ID NO: 51315 - DNA, 201 bp, Homo sapiens; identical to SEQ ID NO: 8770

SEQ ID NO: 51316 - DNA, 201 bp, Homo sapiens; identical to SEQ ID NO: 8771

SEQ ID NO: 51317 - DNA, 201 bp, Homo sapiens; identical to SEQ ID NO: 8772

SEQ ID NO: 51318 - DNA, 201 bp, Homo sapiens; identical to SEQ ID NO: 8774

SEQ ID NO: 51319 - DNA, 201 bp, Homo sapiens
tctacaatgaatcctggcttgtctctacagtggccttgagttccaagggcagctctggtgcccctgtatatgtggatctcgcctacatcccgaatcattgsagtggcaagactgctgaccttgacttcttccgtcgagtgcgtgcatcctactatgtggtcagtgggaatgaccctgccaatggcgagccaagccgggctg

SEQ ID NO: 51320 - DNA, 201 bp, Homo sapiens
taatcattatttatagcccaaatgataagttggcagaagaatgtagaaaaaccatgtaaatcagaacaataggaaagaaaatggtttacctggctgggtgyggtggctcacgcctgtaatcccagcactttgggaggccgaggcaggcagatcacttgaggtcaggagctctaaaccagcctggccaacatggcaaaacct

SEQ ID NO: 51321 - DNA, 201 bp, Homo sapiens
gctcaattgatcctcccatctcagcctcctgagtagctgggactacaggcacacaccaccacacccggctaatttttgtattttttgtaaagatggggttycattatgtaccccaggctggtcttgaacttctgggctcaagcaatccacccgcctcagtctcccaaacagctgggattacagatgtgagccaccactcct

SEQ ID NO: 51322 - DNA, 201 bp, Homo sapiens; identical to SEQ ID NO: 8776

SEQ ID NO: 51323 - DNA, 201 bp, Homo sapiens
tctctacagtggccttgagttccaagggcagctctggtgcccctgtatatgtggatctcgcctacatcccgaatcattgcagtggcaagactgctgacctwgacttcttccgtcgagtgcgtgcatcctactatgtggtcagtgggaatgaccctgccaatggcgagccaagccgggctgtgctggatgccctgctggagg

SEQ ID NO: 51324 - DNA, 201 bp, Homo sapiens; identical to SEQ ID NO: 8778

SEQ ID NO: 51325 - DNA, 201 bp, Homo sapiens; identical to SEQ ID NO: 8777

SEQ ID NO: 51326 - DNA, 201 bp, Homo sapiens; identical to SEQ ID NO: 8779

SEQ ID NO: 51327 - DNA, 201 bp, Homo sapiens
tttttttttttctgtttgagataagaggcttgctctgttgcccaagctagagcgcagtggcgagatctcggctcactgcctcctgggctcaattgatcctyccatctcagcctcctgagtagctgggactacaggcacacaccaccacacccggctaatttttgtattttttgtaaagatggggttccattatgtacccca

SEQ ID NO: 51328 - DNA, 201 bp, Homo sapiens; identical to SEQ ID NO: 8780

SEQ ID NO: 51329 - DNA, 201 bp, Homo sapiens; identical to SEQ ID NO: 8781

SEQ ID NO: 51330 - DNA, 201 bp, Homo sapiens; identical to SEQ ID NO: 8782

SEQ ID NO: 51331 - DNA, 201 bp, Homo sapiens
ctgcagatcgagcatcccgggccccacctcgaccacgcagcaccacaagccaggtcaccccagcagaggaaaaggatggacacagccccatgtccaaaggmctagtcaatggactcaaggcaggaccaagtaagtatatcatgaaacttggcagagagtgtgggttagggctgggtgtgggctggtcagacttcaggagtg

SEQ ID NO: 51332 - DNA, 201 bp, Homo sapiens
gagccgaaattgtgccactatactccagcctgggcaacaaagcaagactctgtctcagaaaaaaaaaaaaaaagaaaatagtttacccaaaaatggaagayggccatggaatttctacatggcagttcttaacctttctaggggtcagtggcccctttgaggtactaagtcagatatcttccaggaaaaatctatataaga

SEQ ID NO: 51333 - DNA, 201 bp, Homo sapiens
acatcactgaggctgatcatggcaactatccatataccctccctctccttacctgttctgtgaacttgaaagtgttcctgcagtctcaccaccctacaacmtgcaaccttatccagaaccttctttgtttttctcccacagggattctctcctggaacattgacctgtcatcctttgacttgaaccaacagttgagactct

SEQ ID NO: 51334 - DNA, 201 bp, Homo sapiens; identical to SEQ ID NO: 8784

SEQ ID NO: 51335 - DNA, 201 bp, Homo sapiens
ctagtgtgcacttcctgagatctgcgcccttgtcacctgcatcttccatgccatgtgtccgtatcctctcgctctactaacatctcgcttgcccatccttmctgcacactccatggcgttccgcagtctccctgaggcagcggagctctatgcagcccctggggcccctctggtcacaccctccaccgcagtgttttggac

SEQ ID NO: 51336 - DNA, 201 bp, Homo sapiens; identical to SEQ ID NO: 8785

SEQ ID NO: 51337 - DNA, 201 bp, Homo sapiens; identical to SEQ ID NO: 8786

SEQ ID NO: 51338 - DNA, 201 bp, Homo sapiens; identical to SEQ ID NO: 8787

SEQ ID NO: 51339 - DNA, 201 bp, Homo sapiens; identical to SEQ ID NO: 8788

SEQ ID NO: 51340 - DNA, 201 bp, Homo sapiens
cacagaagctcctatttccttatttctagacactctgcgggcaggaaagcccagggcagaggcaagccaggaaggagaaagggaagtgagggtcatcatcscaggggccctctctccagctgagccccccatccccaggcagcaccaggagcttagtgctcgagaaggacaaaagcttcttgtcaatagggcagtctgagg

SEQ ID NO: 51341 - DNA, 201 bp, Homo sapiens; identical to SEQ ID NO: 8789

SEQ ID NO: 51342 - DNA, 201 bp, Homo sapiens; identical to SEQ ID NO: 8790

SEQ ID NO: 51343 - DNA, 201 bp, Homo sapiens
gccccccatccccaggcagcaccaggagcttagtgctcgagaaggacaaaagcttcttgtcaatagggcagtctgaggccatagttccaggcagagggatrggggcacaggcagcagagggtgtggtagatgaagggaaggagaggacagccagtgtgggagaggggaggtggaaaccctctaagggaagggctggatgag

SEQ ID NO: 51344 - DNA, 201 bp, Homo sapiens
gaattccctaactggtttaaacttagccgatacttttcaaaccatttgagatttatactatcttttgccttgtgctgactccagtgcataaccaaggaaasagcctataatagtgccttcctcttgcacctcttctaacctcctctttcagtggtggatccttagacaccttcgacaattcaagggtccttcatcacagtt

SEQ ID NO: 51345 - DNA, 201 bp, Homo sapiens
ctgtaaatctctccaagctcttttccagattcagatccacaaacggggggggggggggcagaggtacagcggaacaccgtctcatgtgtcatagtcatgaractagagggtgaggcatccccagcatctgacattctgccagtactcttattttcccctttctgtgcaaaaaggattttcagggccatgtccaaattggtt

SEQ ID NO: 51346 - DNA, 201 bp, Homo sapiens; identical to SEQ ID NO: 8791

SEQ ID NO: 51347 - DNA, 201 bp, Homo sapiens; identical to SEQ ID NO: 8792

SEQ ID NO: 51348 - DNA, 201 bp, Homo sapiens
caagccagcgtcccctgcacggcgtctggatcttcggggaaaacgctcacccacccctggtaaagggcctgcagatcgagcatcccgggccccacctcgaycacgcagcaccacaagccaggtcaccccagcagaggaaaaggatggacacagccccatgtccaaaggcctagtcaatggactcaaggcaggaccaagtaa

SEQ ID NO: 51349 - DNA, 201 bp, Homo sapiens
tggtcaagtctggtaaaagctttcaaaggtgatttttgcaccaggtagtctctccagtggtgactttctaacccctacaaaaaatctggatcttccgagcrttctaatacaaattcagaaacaattaggacagtggaaaactgagtttcaataactctctgattcttttactattggatacctataggaaatagaaggggg

SEQ ID NO: 51350 - DNA, 201 bp, Homo sapiens
aaggaagtgctaccactctccagattcttcctttgagtcctagagcgctttactaaatctgagatggaggtagagactaagggaaacaggatcaacattasaaagatccaaataatataatatagaaacagcaaagagacaaggagagagcaagaacccaatcaccctacaaagtcattatagggtttttttaatctaaag

SEQ ID NO: 51351 - DNA, 201 bp, Homo sapiens
tgtgaggttaatgccactatgtactgcaattggaaaggggatttggcaaggaagggcgggtgcaggggatggcagcattcttcttcagcatcttctgtctsatttgccactttctttctttgctgaattgtttggtgtttcatgtgaggctggagaagggaaataggggatttggggatgccttatctttctccatggcct

SEQ ID NO: 51352 - DNA, 201 bp, Homo sapiens; identical to SEQ ID NO: 8794

SEQ ID NO: 51353 - DNA, 201 bp, Homo sapiens
cagcaccacaagccaggtcaccccagcagaggaaaaggatggacacagccccatgtccaaaggcctagtcaatggactcaaggcaggaccaagtaagtatrtcatgaaacttggcagagagtgtgggttagggctgggtgtgggctggtcagacttcaggagtgggacagaggggaaggttgccaaaagggttctactttt

SEQ ID NO: 51354 - DNA, 201 bp, Homo sapiens
gtcaacgctcactcagaggcagtagtggaacacagtccctatttattaaaggatgggccttttctaagggcagcagagctgcttctgagaccatgaggtgscccttccccctcacctaccttccctttatgttctcacatcagacatatcttatctcccttctaggtgactctgatccctactcatgacacggaggtgact

SEQ ID NO: 51355 - DNA, 201 bp, Homo sapiens; identical to SEQ ID NO: 8795

SEQ ID NO: 51356 - DNA, 201 bp, Homo sapiens; identical to SEQ ID NO: 8797

SEQ ID NO: 51357 - DNA, 201 bp, Homo sapiens; identical to SEQ ID NO: 8796

SEQ ID NO: 51358 - DNA, 201 bp, Homo sapiens; identical to SEQ ID NO: 8798

SEQ ID NO: 51359 - DNA, 201 bp, Homo sapiens; identical to SEQ ID NO: 8800

SEQ ID NO: 51360 - DNA, 201 bp, Homo sapiens; identical to SEQ ID NO: 8799

SEQ ID NO: 51361 - DNA, 201 bp, Homo sapiens
taaaaactgatttcctacatcctgacagtagtgtaataaagacctcagagtcttcaattacactgtgggatgattcctactccatcctctactgcttcatygccctctagtacttgactaacctacttttcccttggtaaacatcatttttgttgataatattataacgatatattaaagcactatggtatcaataatgac

SEQ ID NO: 51362 - DNA, 201 bp, Homo sapiens; identical to SEQ ID NO: 8801

SEQ ID NO: 51363 - DNA, 201 bp, Homo sapiens; identical to SEQ ID NO: 8802

SEQ ID NO: 51364 - DNA, 201 bp, Homo sapiens; identical to SEQ ID NO: 8803

SEQ ID NO: 51365 - DNA, 201 bp, Homo sapiens
acataagttgggagcatgttcttgaggtactgaggggccattcattgcctttccctggatttcctatatctgtgaccactccccttcttccattccaggtwcatcatcttcttagcagctcatcagcttataaactactaatcttgagtgggcaaagtttagagcctgggggagacctcatcctacagagtggcacctact

SEQ ID NO: 51366 - DNA, 201 bp, Homo sapiens
atctaagctgacgtattgtctccagcccactctggaggtgttatgagggacataagttgggagcatgttcttgaggtactgaggggccattcattgccttkccctggatttcctatatctgtgaccactccccttcttccattccaggttcatcatcttcttagcagctcatcagcttataaactactaatcttgagtggg

SEQ ID NO: 51367 - DNA, 201 bp, Homo sapiens
agcatgttcttgaggtactgaggggccattcattgcctttccctggatttcctatatctgtgaccactccccttcttccattccaggttcatcatcttctkagcagctcatcagcttataaactactaatcttgagtgggcaaagtttagagcctgggggagacctcatcctacagagtggcacctactcatatgaaaact

SEQ ID NO: 51368 - DNA, 201 bp, Homo sapiens
cagcaccaggagcttagtgctcgagaaggacaaaagcttcttgtcaatagggcagtctgaggccatagttccaggcagagggatgggggcacaggcagcasagggtgtggtagatgaagggaaggagaggacagccagtgtgggagaggggaggtggaaaccctctaagggaagggctggatgagccagttcctagacctt

SEQ ID NO: 51369 - DNA, 201 bp, Homo sapiens
gctgctcctatgctgggggtgagcagggcagtgagtttttgccaagtaagggaaggtgggggacactatggaaaagaagggaggaaagggtcactaagacstggcacgcgcctccttacagaccaaccggtttgcagtgggctcccccaccctattccctgcggctagctttagaatgggactctaaacccccctttctgg

SEQ ID NO: 51370 - DNA, 201 bp, Homo sapiens
gcagctcatcagcttataaactactaatcttgagtgggcaaagtttagagcctgggggagacctcatcctacagagtggcacctactcatatgaaaacttkgcccaggtccttcacaaccccgaggtaagttccatgccagagtgtctgggagaaagggtagcactagagctgtgggagggatctaagggaaagtctcata

SEQ ID NO: 51371 - DNA, 201 bp, Homo sapiens
gcccaggtccttcacaaccccgaggtaagttccatgccagagtgtctgggagaaagggtagcactagagctgtgggagggatctaagggaaagtctcataytgcatgaccatggggggccctggcagaaaggtaagagtccaccttggaaagaggtgaagattagggtactgaatctaagtcagaccaaaacaactctagt

SEQ ID NO: 51372 - DNA, 201 bp, Homo sapiens; identical to SEQ ID NO: 8808

SEQ ID NO: 51373 - DNA, 201 bp, Homo sapiens; identical to SEQ ID NO: 8807

SEQ ID NO: 51374 - DNA, 201 bp, Homo sapiens; identical to SEQ ID NO: 8810

SEQ ID NO: 51375 - DNA, 201 bp, Homo sapiens; identical to SEQ ID NO: 8809

SEQ ID NO: 51376 - DNA, 201 bp, Homo sapiens
attactggaaacacttgtgcctgagtatgaagaataggagcctagggtggatacatacatctggtctgggggagggaagaggggcagaaggcctcctgggraggggatatgcattccgtggggtcaagagttgaggaccaaataaccaggatcagctaccctggacagcctcttgggctaaaggggtaaaaagctgaagga

SEQ ID NO: 51377 - DNA, 201 bp, Homo sapiens
ttcctaggatgctcagagaaggctgggtaatgacagaccaacccaccccaaggaaatcctattcaagtctaatggctaagtgaggagccaatggcttcttygaacctaaaactggctcctcctcaaccacagctctggcacaggtatgcttcatacaaagagaactacttccccagacaccgctggtgagagctggccagt

SEQ ID NO: 51378 - DNA, 201 bp, Homo sapiens
atgcagacactgcccaatcagaacgtggctcacaggcagccttgctgaatctgatactgtgttcctttctttcctgtactatctccaaagcaaaggcaaaygggacaaaaaaaaacccaaaaacccaaaaaacaaaacaaaacaaaaaaacaaaaaaacaagtgctgctggagccctagggtgaaagataggcgctcccat

SEQ ID NO: 51379 - DNA, 201 bp, Homo sapiens
gaggggctggacacggtggctcatacttgtaatcccagcactttgggaggccgaggtgggcagatcacaaggtcaggagttcgagaccagcctgaccaacrtagtgaaactcctcctctactaaaaatacaaaaaaaaattagccaggcatggtggcgcatgcctgtaatcccagctacagctactcaggaggctgaggca

SEQ ID NO: 51380 - DNA, 201 bp, Homo sapiens; identical to SEQ ID NO: 8811

SEQ ID NO: 51381 - DNA, 201 bp, Homo sapiens; identical to SEQ ID NO: 8812

SEQ ID NO: 51382 - DNA, 201 bp, Homo sapiens; identical to SEQ ID NO: 8813

SEQ ID NO: 51383 - DNA, 201 bp, Homo sapiens
atccagcagagcagggctggagttctgccaaatgagctcagacccccagaaaaactaatgacattcatcaggctagaagagaaggcccagcatcttttctktatgaattgccagagctgccttaaatcttatggagactttaagcattgaaagaattatgatgttcttctctcctatgaacacctaattcaagatgagtgc

SEQ ID NO: 51384 - DNA, 201 bp, Homo sapiens; identical to SEQ ID NO: 8814

SEQ ID NO: 51385 - DNA, 201 bp, Homo sapiens; identical to SEQ ID NO: 8815

SEQ ID NO: 51386 - DNA, 201 bp, Homo sapiens; identical to SEQ ID NO: 8816

SEQ ID NO: 51387 - DNA, 201 bp, Homo sapiens; identical to SEQ ID NO: 8817

SEQ ID NO: 51388 - DNA, 201 bp, Homo sapiens
attttaaaaatattttttgtttttttttttttgagacggagtctcgctctttggcccaggctggggtgcagtggcgctacctcggctcactgcaagctccrcctcctgggttcacgccattctcctgcctcagcctcccaagtagctgggactacaggtgcccgccaccgcgcccggctaattttttgtatttttagtaga

SEQ ID NO: 51389 - DNA, 201 bp, Homo sapiens
gtaggactcatgtttgtctaacctttagggatgtgacctactgtaaagtgctgtcctcagttctttgcttttccttccttcctttttttttttttttttttgtctaaccccattgagaggtgacagcgtgctggcagtcctcacagccctcgctcgctctcggcgcctcctctgcctgggctcccactttggcggcacttg

SEQ ID NO: 51390 - DNA, 201 bp, Homo sapiens
cgggaagtacgcacacttgtcactcgtgtcattacagatgtgtattatgtggatggaacagaagtagaaagaaaagtaactgaggtaatacatactctgartctgtgtggcaaatttctttctttcttttttttttttttttggagacagggtcttactttgttacctaggctggaatgcagttgcgtgattttgtttcac

SEQ ID NO: 51391 - DNA, 201 bp, Homo sapiens
ttgagtagatgaaaagaagtcgtagaaatgtatgtgttaacaaatacgtagaagttcacaacatttcattgagtggcagagtgggatctatggcagagaaratttggaagttactagtaaacagtagtctctgcttatcagtggtttctttttcttggtggttttagttgcccatggtcagctgcagtccagaaatactaa

SEQ ID NO: 51392 - DNA, 201 bp, Homo sapiens
ggggtggcaagcatggcggcggtgacggggaaggggttggagggccctaaggagggggtggggaaacgttagctaagaaggcttggtggtcgtgaggaaasctgaaaggctgtggggcctctggcgaacagattttagaaaacattcttttggggggaggtagaggcgccagaaggacgtggcgggggggatggaaaaagg

SEQ ID NO: 51393 - DNA, 201 bp, Homo sapiens
tttgattgtccaagttgtttgttttgtaaaaataaaatacagttcttatttattgaacacctgtggcacatatgggatatgagcattgtgttcaagacaatgatatattttatgttatgcagattttaccatagtaaaaatatatagatggtgtatagaataacagaaattgaaattggtgtgccatcttttgaagagagg

SEQ ID NO: 51394 - DNA, 201 bp, Homo sapiens
ttttgattgtccaagttgtttgttttgtaaaaataaaatacagttcttatttattgaacacctgtggcacatatgggatatgagcattgtgttcaagacaatgatatattttatgttatgcagattttaccatagtaaaaatatatagatggtgtatagaataacagaaattgaaattggtgtgccatcttttgaagagag

SEQ ID NO: 51395 - DNA, 201 bp, Homo sapiens
attttgattgtccaagttgtttgttttgtaaaaataaaatacagttcttatttattgaacacctgtggcacatatgggatatgagcattgtgttcaagacaatgatatattttatgttatgcagattttaccatagtaaaaatatatagatggtgtatagaataacagaaattgaaattggtgtgccatcttttgaagaga

SEQ ID NO: 51396 - DNA, 201 bp, Homo sapiens
ggtgtcttagtctctttgggctgctgcaacaaactgccataggctagatagcttataaacaaaagaatttatttctctcatttctggaggctgagaagttytagatcaaagcactggcagatttggtgtctggtgagggcctgcttcctggtttgtagacagctgttctcacatggcagttgggggcaagagagctctctg

SEQ ID NO: 51397 - DNA, 201 bp, Homo sapiens
atgttgcccaggctagtctctaactcctgaagctcaagtgatccacctggcttggcctcccaaagtggtaggattacaggtataagccaccgtgcccagcstacatgaaacttttaagtgttgtttgtaactgtactctgttcaaattacttgctgtcaccttatttctcaatcattttactacagaaggtttcaagcata

SEQ ID NO: 51398 - DNA, 201 bp, Homo sapiens
actctgtctcaaaaaaaaaaaaaaaaaaaaattaaaacaaatctggcctgcactgcagcctgggtgacagagcgagactgttgtctcaaaacaaacaaacmaaaaacaagaaatctggcagatcacttgatttcaggagtttgagaccagcttgggaaacttggcaaaaccctgtctttcctaaaaaatacaaaaaattag

SEQ ID NO: 51399 - DNA, 201 bp, Homo sapiens
atatataattatgtaaattagagccactggaatttttgaaattattaaagaaaaacacacaaaacaggaaaagctttttatttaaaaacatttgaacttargaactttttctcctggtgatatgaatttcctaggtcagaggacatgccttttagccccaaagcatctgttgctgctatggaagcaaaagaacagttgtct

SEQ ID NO: 51400 - DNA, 201 bp, Homo sapiens
tgcactccagcctgggcgacagagtgagactctgtctcaaaaaaaaaaaaaaaaaaaaattaaaacaaatctggcctgcactgcagcctgggtgacagagygagactgttgtctcaaaacaaacaaacaaaaaacaagaaatctggcagatcacttgatttcaggagtttgagaccagcttgggaaacttggcaaaaccct

SEQ ID NO: 51401 - DNA, 201 bp, Homo sapiens
tggagtgcaatggggtgatctcagctcactgcagcctccatctcccaggctcaagcgatcctcccatcttagccccctgagtaggtgggactacaggcacrcccaccacccatgcctggttaatttttgtatttattatagagatggggcttcgccatgttagccaggctggtgttgaactcctgggctcaagcgatcctc

SEQ ID NO: 51402 - DNA, 201 bp, Homo sapiens
ttacaggcatgagccatggtacctggcccctctttacagtttctttagctgagcatatgtactttaatcctttatttctaaagaccatttctttttctctytttatctcctcagattactaattcattttctcttgaaaccccatctctactaaaaatacaaaaaattagctgggcgtgatggagggcgcctgtagtccca

SEQ ID NO: 51403 - DNA, 201 bp, Homo sapiens
gagccaagttaatttaacattttttatgaatgggtgggtagccccagatgcatccagttttgatctatacctaaaaataggagcttggactgctccgccamccaaaggaagtattggtagattgctaggacccagtctactattattctgtcagcttttctgaaaaattacgtcactatttttttagagtgaaaatgtctg

SEQ ID NO: 51404 - DNA, 201 bp, Homo sapiens
ccacagagcaaaatatgagatgtttaacatcccaaatttaaagtttttcagacttaatggaattaatttttccataatttctttttctttttagagacagkgtctcactctgtcacccaggctgaggtgcagtggtgcagtaatagctcacggcagccccaaattcctaggctcaagcaatcctcctgcctgaaccccctg

SEQ ID NO: 51405 - DNA, 201 bp, Homo sapiens
gtgggaattctgttatagcagcagaaaacagactaagatgtactgctactgttttgtgagcttgagcttaccttatttttttataccttgagggactatartgtattctggatagattgatgagctgtcatgagaaattttgttaaatattttatagatacacatttttgtctttatctgccagttgtatcaatttgaaat

SEQ ID NO: 51406 - DNA, 201 bp, Homo sapiens
atgcctgtagtcccagctactcgggaggttgaggcaggagatcgcttgaacccaggaggcggaggttgcagtgagctgagatcacgctactgccctccagyttgggtgatagagtgagactgtctcaaaataaagaaataaataaataaaattacaagaaatgtttgtatgtttatacttactagttttacttatttttat

SEQ ID NO: 51407 - DNA, 201 bp, Homo sapiens
gtagtggggctggagatgagggatgaatttgaggagcgagtaggcagaacgatggtgccaggtgaatatggaagtaagggggaggaaaaaaagagagaatkactcttcacatatactgtatgatctcatttccataatagtactcccaagtaggtatctgcattttcattttattgatgagaaaacagagtaagagaggtt

SEQ ID NO: 51408 - DNA, 201 bp, Homo sapiens; identical to SEQ ID NO: 9029

SEQ ID NO: 51409 - DNA, 201 bp, Homo sapiens
ataagaccttaagtgggggaattattgtagttttattgggacaacttattttacccctttcagtttgcaggtgttataacaagagtttgtatttaaaagtraaatttgaaaatgaatagtaatgaactgtaaatttagtgaggaggggacagtaggaagaaattgatttgttttctggagttttaaaacttgttttgttaa

SEQ ID NO: 51410 - DNA, 201 bp, Homo sapiens
aaaagtgaataggttggctagtcagaactaagtggagatggagacccctgacctggggcctcggcggtgcctgagctcctccagcagacaacgagggcacygaagggggagccgtcataagggatctgctctaagttttactactgggtgtgaaggggaaggggagtggtaccggcattgaaccttatgcactggattggg

SEQ ID NO: 51411 - DNA, 201 bp, Homo sapiens
gtattttcttctaaaagcgagggaaaactattaatttgtataattttaaatttaaatatttaaagaaatgaaattcaggtttcatactgagttgaaaatcyttaaatctaaatgactattatatattcaatctaaatacctattcttataagaccttaagtgggggaattattgtagttttattgggacaacttattttac

SEQ ID NO: 51412 - DNA, 201 bp, Homo sapiens
aaaatgttactgcaaaattgcgaagtgacataaatcattattctactttaacacaactgttactgtaatttttgtctttctacatgcttatggtttttttwaataaatttttttgcctatgacacagcctcaggaggtcctgacgatatgtgcccccacatgcttatgttttttaaaaaaggtgtttatatagcacaactt

SEQ ID NO: 51413 - DNA, 201 bp, Homo sapiens
attggggtataatttacataccataaaattcacacgttttaaatgtataattttgtgatattttagtaaatttacagagttgtgaagctgtcgtcacaaarcagttttagaacagttccaaagtcacctaacatcttgatttttttttatgtttaaactttttacaatgtctttaaactttttgaaaatgttactgcaaaa

SEQ ID NO: 51414 - DNA, 201 bp, Homo sapiens
tttctcaatttgtttctcctgttttaaaccagataagccaatggacacgtcagtgttatctgaagaaggaggagagccttttcagaagaaacttcaaagtrgtgaaccagtggagttagaaaacccccctctcctgcctgagtccactgtatcaccacaagcctcaacaccaatatctcagagcacaccagtcttccctcc

SEQ ID NO: 51415 - DNA, 201 bp, Homo sapiens
tgagagaggatttgttattttaggctgggagaggcctgagcaagtttacagattttaacccatttatgcctagtgttccactattggaacactaagcttgygggagttatttatatcctgctgctcaaggtcatcaccaaggtctgatttttcacaaaaaaaaatttgcaacctccagcataaatgggttaaggaaggatc

SEQ ID NO: 51416 - DNA, 201 bp, Homo sapiens
acatgattgtgcagatgtctaaatttctcctctttattaggttgcagatttctcataattaaattgagagtcattaagaaatttgctagtaatttaaaatrttccacctgatttggtattcaggaatttgtagttcattggttagcccctttctgcatattgagttttcttcctcttgtattcatttgtttttcaaatatt

SEQ ID NO: 51417 - DNA, 201 bp, Homo sapiens
tggaatacctgtgagggaagaataagctgggctagggttcttttgcttaagaagtctttgaggaggcttcagaaaaatactcacaaactaagtcatatagyatttagatttgttgtttgatggtttgaaatttattatataattataggaccaaatgagatgatcccaacttaatgacatctatctaggttttaaagatag

SEQ ID NO: 51418 - DNA, 201 bp, Homo sapiens
tcccaggttcaagcagttctcctgcctcagcctcctgagtagctgggattacaggcacctgccactacacccagctaatttttgtatttttagtggagacrgggtttcattattttggccaggctggtctcgaacttctgacctcaagtgatccatccgccttcgtctcccaaagtgttgggattacaggcatgagccatg

SEQ ID NO: 51419 - DNA, 201 bp, Homo sapiens
agccataaaaaatgatgagttcgtgtcctttgtagggacatggatgaaattggaaatcatcattctcagtaaactatcgcaaggacaaaaaaccaaacacygcatgttctcactcatagatgggaatagaacaatgagaacacatggacacaggaaggggaacatcacactctggggactgttgtggggtggggggacggg

SEQ ID NO: 51420 - DNA, 201 bp, Homo sapiens
taatgaagacagtggttggaaaatagtatttatgaggagaagttaaataaaaataattttaactacaaattagaacatgaagggagaataatagctttttrtctttttttttgtttgtttttgagccagggtctcactctgtcgcccaggctggagtgcagtggcaccatcaatgttcactgcagccttgacctcccgggc

SEQ ID NO: 51421 - DNA, 201 bp, Homo sapiens
atgagccaccatgccccgccgctttacacattcttaaaaaatgttttaaaatggacttgaataattgcttaatgatggtttcgtatcctgtcaactcaaastgcctaagggaatggtcagtggtagaagcagtctgaggaaaccaatgagccttacttacaggtttcaataggataaaggattgagccagcaaattgctca

SEQ ID NO: 51422 - DNA, 201 bp, Homo sapiens
ctggtgggaattctgttatagcagcagaaaacagactaagatgtactgctactgttttgtgagcttgagcttaccttatttttttataccttgagggactrtagtgtattctggatagattgatgagctgtcatgagaaattttgttaaatattttatagatacacatttttgtctttatctgccagttgtatcaatttga

SEQ ID NO: 51423 - DNA, 201 bp, Homo sapiens
tagccacaggcaggtcctaggtaataaaggccgaaagtctcaaactaactaatgattcgaggtggtaaatagggctttaagacctaatttgctaagaagtwatcttttaaaaattattcagatctgactaaaatatgaactcgggctgtctgtaaatagaaaattatgaacaagaaataatgaagctggatgctatgttag

SEQ ID NO: 51424 - DNA, 201 bp, Homo sapiens
atatggctgttgtaactggaagaatacagggaagcttcttggctgcatttcaggaatatgtaaagcactgaaaccttttagactgactttctctttagtgsggaatagtctgattgtgtgtgcaggcaggaagtacaggctgtcatagttctcatgcatgggtaccctgatgattgaggtaggacagacctgtgctttaac

SEQ ID NO: 51425 - DNA, 201 bp, Homo sapiens
tgtattttctgtcacagggagaagaagagtttgatatgcctcagcctccacatggccatgtcttacatcgtcacatgagaacaatccgggaagtacgcacrcttgtcactcgtgtcattacagatgtgtattatgtggatggaacagaagtagaaagaaaagtaactgaggtaatacatactctgagtctgtgtggcaaat

SEQ ID NO: 51426 - DNA, 201 bp, Homo sapiens
cccccctccctactgaattattttgaagataatttcagcattatataattttatctgaaatacttcagtgctgtctccaaaagataaggattcttattttraacttaaccgtattactattatcatactttaaaaaattgacaatggttccttaatatcatgaaatattcaatgttcagatttctctgattgtctcataaa

SEQ ID NO: 51427 - DNA, 201 bp, Homo sapiens
gagagggaatgagcagatataaatgtatacactgtaaatgtgactgacagcagtatctgaatgtgtctgtaaaggctaaaggtccagatggaatgatgttrtacaagttagagttctgactaatgttgtcttgcaagagggaattgaattaggcaacatggttgtcataatttgcaccactggacatctgtgagggttggc

SEQ ID NO: 51428 - DNA, 201 bp, Homo sapiens
tcatgactgtgtaaaatttaaatatgtaaatttctctttgttgtaaattttatcctaggctgtcggccatttagaatggttggccattggaatggtctttrgtttctggctcagataagttcatcaggacagtgcctgcccatcaggtcatgcttggtgctggggccttttggtgttaaggcttttgctgaggcaatggtg

SEQ ID NO: 51429 - DNA, 201 bp, Homo sapiens
ttctgtcaagaaactttccttgtcctaatcccagtgtagtagctacatatatcctaagtgttactgtttgggattgacaactggaattttgttaagtcctmacttcagtccactgttggatctctaaattccctaactcaggcctgctttacagagcccttgtgagagggtgctaaggagcctaagacaacagcaagcttc

SEQ ID NO: 51430 - DNA, 201 bp, Homo sapiens
ctcctgagtagctgggattataggtgtgtgccaccatgcccagctaatttttgtgtttgtagtagagatgggatttcaccatgttggccaggctggtctcraactcctgatctcaagtgatctgccttggcctcccaaagtgctgggattacaggcgtgagccactgcgcccggcctgttttttattctttgtgtatacca

SEQ ID NO: 51431 - DNA, 201 bp, Homo sapiens
accatgagccaaatcctgtaaatctttttctttatcaatttcccagtctggtgggaattctgttatagcagcagaaaacagactaagatgtactgctactrttttgtgagcttgagcttaccttatttttttataccttgagggactatagtgtattctggatagattgatgagctgtcatgagaaattttgttaaatatt

SEQ ID NO: 51432 - DNA, 201 bp, Homo sapiens
aatttacttctgtcgtctaggttagaatctttgctggtagccagaggttgtgaacttatccaataaaaagataaactctttcttaccaatatagtaccatstttattttatattttattgagatacagtatagtcccattagaatgaacaattcttctcagaatcacctgggggagaaaaaaaaaagaacagatcctaaat

SEQ ID NO: 51433 - DNA, 201 bp, Homo sapiens
ttttctacacctagaactaagataattgaaatgtctttacttttgttcatgtgagagttcctttccccccttttttctgttgctgatacaagagtctccayaatctcaggattgttgatccaattgatgagaaaaagaaggattaacaagagatagctacagaccttgttccttctgcaatcgcatactcagctgcagcct

SEQ ID NO: 51434 - DNA, 201 bp, Homo sapiens
caggtgtgcactcccacgcctggctaatagttttattttcatatggagacctgttctcactatgttgcctaaggtggtctcaagctcctggactcaagcartccttctgccttggcctcccaaagtgctgggattacaggcgtgagccaccacacctgaccccttttagcctatttttgcatatacttttctattgccttg

SEQ ID NO: 51435 - DNA, 201 bp, Homo sapiens
ggggtttcaccatgttggccaggctggtcttgaccgcctgacctcaagtgattcacctaccttggcctcccaaatgccgggattataggtgtgagccaccrtgctcggccacatttattttttatttttgaaaaatttggggggtgcacagggctttgatgtgaaggacttaacgggaccctcctttgctgaggacagcag

SEQ ID NO: 51436 - DNA, 201 bp, Homo sapiens
tattctaagcactttagtgaattatttaattcttaacaactattctgtgatagatccagttattattctcattttgcagatgtgaaaacacaagtgtatcwagttaaaataggccactgagaatgatgacagaagtaggaatggggaaggtagagaggttatgaagctaaggtcttcatgcatgagagagggtgatttgga

SEQ ID NO: 51437 - DNA, 201 bp, Homo sapiens
aataccagacattgaaatatcagaagttatggaatatacagaatgctttactacccatttgattcctcattcccttaaaaatcataggaaaaaaagcctgrgcgtggtggctcatgcctgtaatcctagcagtttgggaggctaagctgggcagattgctcaagcccaggattttgaaacaagcctgggcaacaaaatgag

SEQ ID NO: 51438 - DNA, 201 bp, Homo sapiens
tgaggactttttgaacatggattggcatataatgggggaaaatggctttctttctatctttttttttttttttgagacacagtttcactctgcctcctagrctggagtgcagtgagtggcgtgatcttggctcactgcaacctctgcctcctgggttcaagtgtttctcgtgcctcagcctcccgagtagctgggtttaca

SEQ ID NO: 51439 - DNA, 201 bp, Homo sapiens
agacagggtctcatgctatcacctaggctggagtacagtggcatgatcccggctcactgcagccttgacttccaagctcaagtgatcctcccacctcagcstcccaagtagctgggactacaggtgtgcactcccacgcctggctaatagttttattttcatatggagacctgttctcactatgttgcctaaggtggtctc

SEQ ID NO: 51440 - DNA, 201 bp, Homo sapiens
gcagtggtgcaatctcggcttactgcaacctccgcctccaaggttcaagtgattctcctgcctcagcctcccaagtagctgggattacaggtgcccaccascacgcctggctgatttttttgtatttttagtagagacagggtttcaccgtgttgaatgctagcacattttgaaatcgtgaagtaaaatgagtacgtatcc

SEQ ID NO: 51441 - DNA, 201 bp, Homo sapiens
ctactccttcaagggaggaaggtgggtgttctttggcttccactcctgccaccactctgcatctcctgcagctctctggtcagaggtcccttgttcaggasagtctttccacgtaagtaagcctaaaatagcttatgccaaggcagtatgtgcctgagagtcttaggctaaggctgaaagaggctaaacttatctgctagt

SEQ ID NO: 51442 - DNA, 201 bp, Homo sapiens
gtttatcaacaaaggaaaaaagttaaaatgagaaagttaaaatgagactctttcataaaggatttagcaatgttttgaatggatcatagactttttagttratacttttttaagttcagtgaagcttttttctacacctagaactaagataattgaaatgtctttacttttgttcatgtgagagttcctttcccccctttt

SEQ ID NO: 51443 - DNA, 201 bp, Homo sapiens
ttttattggttggtaagaggcacagctattttctttttttttttttttttttgaggcagagtcttgctctgttgcccaggctagagtgcagtggtgcaatytcagctcactgcaacctccgccttcctggttcaagtgattttcctggctcggcctcccaagtcgctgggattgcaggcacccgccaccgtgcctggctaa

SEQ ID NO: 51444 - DNA, 201 bp, Homo sapiens
ggagagaggtatggcacttcttacaatttattggattgctgtagaagtaaaattcaattcaggtattctaacctgaataaacagcttctgaggtgtcttartctctttgggctgctgcaacaaactgccataggctagatagcttataaacaaaagaatttatttctctcatttctggaggctgagaagttctagatcaaa

SEQ ID NO: 51445 - DNA, 201 bp, Homo sapiens
aggtctcgaactcctcacctcaggtgatccacccgtcttggcttcccaaagtgctgggattactggtgtgagccactgtgcccagcctaaaatttactttyttagcatcagtttctaagtctggcatatagtgaccagagtagaattgcatagctggaactaatggagagggagagaggtatggcacttcttacaatttat

SEQ ID NO: 51446 - DNA, 201 bp, Homo sapiens
ctccataatctcttagaacagtcgtgaggcaggaaaaaagttttgagttacaggcctttatctctatttaaataattaaggaagcggctggccacggtggstcacgcctgtaatcccagcacttggaggccaaagcatgaggattacttgaggccaggagtttgagatgagcctgggtgacatagtgagaccctatttcta

SEQ ID NO: 51447 - DNA, 201 bp, Homo sapiens
ggctcaagtgatcctcctgcctcatcttcccaacgtgctagaattacagatatgagcaactgtgcttagccccataatttctttactccataatctcttaraacagtcgtgaggcaggaaaaaagttttgagttacaggcctttatctctatttaaataattaaggaagcggctggccacggtggctcacgcctgtaatcc

SEQ ID NO: 51448 - DNA, 201 bp, Homo sapiens
atggtgttttacagtttgactcaagatctaaataaggtctgcatattgcatttgattatatctctttaagtcttttaaaatacagagtacccctccagtcytttttttttttttttttttttttttttgcctcttgcttgcaaattatttgttgaaggtacagattgttgtatggttttctacattctggattttgctgat

SEQ ID NO: 51449 - DNA, 201 bp, Homo sapiens
tccttttctgtaaagaacagactgataaatctctctcatgtataaagattgtatgtattattttaaatccttagaaactcaaatggagtttagaacactcygtttcaaactacctgtgttttctcacatattttcatgtctactcattctgttctttatttgtcactatctgtgtgtggtcatagacctgttggtaagaaa

SEQ ID NO: 51450 - DNA, 201 bp, Homo sapiens
agaaaaattctcttgactttctaccccatcccgctttcctgtgcaacactttgtttttcttcatctttttattaccagagatagaagaacagggttagaarttagacttcctgctttctaaagctttccccagccataggtttgctgtttgaccattggttagttatttaatgcatcccatcatgctttccttttctgtaa

SEQ ID NO: 51451 - DNA, 201 bp, Homo sapiens
tgacaatggttccttaatatcatgaaatattcaatgttcagatttctctgattgtctcataaatggtgttttacagtttgactcaagatctaaataaggtytgcatattgcatttgattatatctctttaagtcttttaaaatacagagtacccctccagtcttttttttttttttttttttttttttttgcctcttgctt

SEQ ID NO: 51452 - DNA, 201 bp, Homo sapiens
aatacaagtactagatgtaatgattttgatttagacaagaataggtcattttattaggtcatgctcatataaacttctcttagcctctggctatataactsatccatccctggtcttacctataggtggataaaacaaaacagtaggaagattctgtcacactagattcatggagcctctaaacagttctcatcatgaagc

SEQ ID NO: 51453 - DNA, 201 bp, Homo sapiens
tataattttatctgaaatacttcagtgctgtctccaaaagataaggattcttattttaaacttaaccgtattactattatcatactttaaaaaattgacartggttccttaatatcatgaaatattcaatgttcagatttctctgattgtctcataaatggtgttttacagtttgactcaagatctaaataaggtctgcat

SEQ ID NO: 51454 - DNA, 201 bp, Homo sapiens
attttactacctttcctaataccaggagcatagtatcaaggactgtattcagtgttacttacatcatttcatccttacaacaaactttttaggtttgttgkgtttttatcttatagaggaggacactgagactcaaaatgacaaagtagtttactcctaggttggactattaagtgcaatagccagggtgtgagccaggtt

SEQ ID NO: 51455 - DNA, 201 bp, Homo sapiens
tcagtaaattttactacctttcctaataccaggagcatagtatcaaggactgtattcagtgttacttacatcatttcatccttacaacaaactttttaggkttgttgtgtttttatcttatagaggaggacactgagactcaaaatgacaaagtagtttactcctaggttggactattaagtgcaatagccagggtgtgag

SEQ ID NO: 51456 - DNA, 201 bp, Homo sapiens
ggagccggaccactcagagggaaaaccagcgggacagaacccgcagattttgccttacccagctcccgaggaggcccaggaaaactgaggtgcagacaggktctccagagagagagagccacagcaggggcagggttgctgacattttaatatcacaggaaaaggggagtaatgggaaatcccccatcctccattaaagat

SEQ ID NO: 51457 - DNA, 201 bp, Homo sapiens
tagttgcatgtttgtttttttaagaaactgccaaacttttctagagtggccgtactgttttatagtcccaccagcaatgtatgagtgatctaattttttttcatccttactggcatttggtgttttcagtattttttattttagccattacaagtctgtagtgatacctcattgttgtttcagtttgcatttccctaatgg

SEQ ID NO: 51458 - DNA, 201 bp, Homo sapiens
gcactcatcttgaattaggtgttcataggagagaagaacatcataattctttcaatgcttaaagtctccataagatttaaggcagctctggcaattcatamagaaaagatgctgggccttctcttctagcctgatgaatgtcattagtttttctgggggtctgagctcatttggcagaactccagccctgctctgctggat

SEQ ID NO: 51459 - DNA, 201 bp, Homo sapiens
tcttggttgttttcagccagccctctggagtggcatctattaatatatatcttactcttcctggtacagcagaaatagccctaaacaccagaacatttttwaaaagtctgtaacagctgtgctgtagcacactgaggaataacaaccagctcatgtcagaggaggcataaccgttccattagaaactaccagagatcattt

SEQ ID NO: 51460 - DNA, 201 bp, Homo sapiens
gactggtggtgcagcctctgtgaagcagcaccattcaagtgcccataacaaaggtacctgaaagagtgtgtgtagtgtctttgttccagggatctccttaracctgtaggtgttaggccttgtggtccaaggctcaggcctaataggttgaccgtatccatgtttcttagagaagaaaagtaccaccttcaagaggtgagt

SEQ ID NO: 51461 - DNA, 201 bp, Homo sapiens
tatgaagccatggaagcctatggggaggggagttacaagaagatcatgtcaggcacaggagcaagtttagtaagatgtgtctggaaatatactttgacttyggcgaggcaattaggatccatttggtgactctagcaagagccatttcagtgcagcagttggggtgggagctatactgaaagtaattgaggaaggatgagg

SEQ ID NO: 51462 - DNA, 201 bp, Homo sapiens
gaatgacagacctctgggaagccagctaccactgaatctcggtatcagttttttttaaagtttagagttagaaggggtggtcgcctcctttcacagatgcrgaagctagggaccagcaaggcggggtgcccacggctgcacagctagttcatatcagaattgggagtggaaggcccactgcctcccagcatagcaatacat

SEQ ID NO: 51463 - DNA, 201 bp, Homo sapiens
tggtatgatcacagctcactgcagccttgacctcctggctcaagggagcctcccacctcagccttctgagtagctgggaccataggcacacgctaccacayctgctaatttttgtatcttttgtagagatggggtttcactgtgttgcccagactggtcttgaactctgttctcaagtgatcttcctgccttggcctccca

SEQ ID NO: 51464 - DNA, 201 bp, Homo sapiens
aaattaagtaggtggctgtgcctggtggcacatgcctgaaatcccagcgcttttggaggctcaggtgggaggattacttgagcccaggagtttgagactaractgggcaacatagtgagaccttgtctcttaaaaaaaaaattgagtagatgaaaagaagtcgtagaaatgtatgtgttaacaaatacgtagaagttcaca

SEQ ID NO: 51465 - DNA, 201 bp, Homo sapiens
cctttggatctgaaattacaactagcgaagtgttaaggatggttatatcagtaaattttactacctttcctaataccaggagcatagtatcaaggactgtwttcagtgttacttacatcatttcatccttacaacaaactttttaggtttgttgtgtttttatcttatagaggaggacactgagactcaaaatgacaaagt

SEQ ID NO: 51466 - DNA, 201 bp, Homo sapiens
tctgacctcaagtgatccatccgccttcgtctcccaaagtgttgggattacaggcatgagccatggtacctggcccctctttacagtttctttagctgagyatatgtactttaatcctttatttctaaagaccatttctttttctctctttatctcctcagattactaattcattttctcttgaaaccccatctctactaa

SEQ ID NO: 51467 - DNA, 201 bp, Homo sapiens
tgaggcttgagaatcacttgaactcgggaggcggaggttgtagtaagctgagattgcaccactgcactttagcctgcgcaacagggcgagaccctgtctcmaataaataagtaaataaataatgcatgcttaattttgaaaaacattcaaacaatacaaagtagagattctgagtggggagggtgtggggagagagggagt

SEQ ID NO: 51468 - DNA, 201 bp, Homo sapiens
caccatgcccagctaatttttgtatttttagtagagacggggtttcaccatgctggccaggatggtttcaatctcctgacctcgtcatctgccttcctcgrcctccaaagtgctgggattacaggcgtgagccgctgcacccagcctagaacagtcccattttatacccattgtctaagtgtgattattaatagtactttt

SEQ ID NO: 51469 - DNA, 201 bp, Homo sapiens
ttgaactcctgacctcaggtgatatacctgcctcagcctcccaaaatgctgggataataggcatgagctaccacacctggccactggattttaatacctgytttatgaatgctagctttttttttttttttttttttttttttttttgagatggagtctcactccgtcacccaggctggagtgcagtggtgcaatctcggc

SEQ ID NO: 51470 - DNA, 201 bp, Homo sapiens
ctttattttatgaaattcagcatgaaaacgtagattactttctaaagtatttgtacaggctgggtgcagtggctcacgcctgtaatcctaacactttgggrggccaaggtgggcggattgcctgagctcaggagtttgagaccagcctggctaacatggtgaaacccatctccactaaaatacaaaaaattagccaggtgt

SEQ ID NO: 51471 - DNA, 201 bp, Homo sapiens
tctttattttatgaaattcagcatgaaaacgtagattactttctaaagtatttgtacaggctgggtgcagtggctcacgcctgtaatcctaacactttggraggccaaggtgggcggattgcctgagctcaggagtttgagaccagcctggctaacatggtgaaacccatctccactaaaatacaaaaaattagccaggtg

SEQ ID NO: 51472 - DNA, 201 bp, Homo sapiens
ttcttgttctttattttatgaaattcagcatgaaaacgtagattactttctaaagtatttgtacaggctgggtgcagtggctcacgcctgtaatcctaacwctttgggaggccaaggtgggcggattgcctgagctcaggagtttgagaccagcctggctaacatggtgaaacccatctccactaaaatacaaaaaattag

SEQ ID NO: 51473 - DNA, 201 bp, Homo sapiens
tagttcttgttctttattttatgaaattcagcatgaaaacgtagattactttctaaagtatttgtacaggctgggtgcagtggctcacgcctgtaatcctmacactttgggaggccaaggtgggcggattgcctgagctcaggagtttgagaccagcctggctaacatggtgaaacccatctccactaaaatacaaaaaat

SEQ ID NO: 51474 - DNA, 201 bp, Homo sapiens
tttctaaacttagttcaaaaaatacatatctcttaaacctgaaactggaaaatgtattagttcttgttctttattttatgaaattcagcatgaaaacgtarattactttctaaagtatttgtacaggctgggtgcagtggctcacgcctgtaatcctaacactttgggaggccaaggtgggcggattgcctgagctcagga

SEQ ID NO: 51475 - DNA, 201 bp, Homo sapiens
gttgaaggacatctgcatttttttttcttgtttttgactactattgagaagctgttataagcatttatgaacaggtttttcttttctttttttttttttttgagatggagtcttgctctgtcgcccaggctggaatgcaatctcagctcactgcaacctccactccagggtttaagtgattcttcagcctcagcatcctga

SEQ ID NO: 51476 - DNA, 201 bp, Homo sapiens
gagttgaaaatccttaaatctaaatgactattatatattcaatctaaatacctattcttataagaccttaagtgggggaattattgtagttttattgggasaacttattttacccctttcagtttgcaggtgttataacaagagtttgtatttaaaagtaaaatttgaaaatgaatagtaatgaactgtaaatttagtgag

SEQ ID NO: 51477 - DNA, 201 bp, Homo sapiens
tatttttttaaagcagcattattggggtataatttacataccataaaattcacacgttttaaatgtataattttgtgatattttagtaaatttacagagtkgtgaagctgtcgtcacaaagcagttttagaacagttccaaagtcacctaacatcttgatttttttttatgtttaaactttttacaatgtctttaaacttt

SEQ ID NO: 51478 - DNA, 201 bp, Homo sapiens
tgattagtgactgatatcaatctaagtataacatgattaggtgaattaattctacaaaaacccaggtaatacaagtgaagtttggttaattcttaaaacartttcttttatcttttatctgtagtgtgaacattgaaaaaatataaaaataattatattaaatatactttctcaggctgggcacggtgtctcacacctgta

SEQ ID NO: 51479 - DNA, 201 bp, Homo sapiens
gctggacgtggtggcgcatgcctgtagtcccagctactcgggaggttgaggcaggagatcgcttgaacccaggaggcggaggttgcagtgagctgagatcmcgctactgccctccagcttgggtgatagagtgagactgtctcaaaataaagaaataaataaataaaattacaagaaatgtttgtatgtttatacttacta

SEQ ID NO: 51480 - DNA, 201 bp, Homo sapiens
ccaccatgcccagctaatttttgtatttttagtagagacggggtttcaccatgctggccaggatggtttcaatctcctgacctcgtcatctgccttcctcrgcctccaaagtgctgggattacaggcgtgagccgctgcacccagcctagaacagtcccattttatacccattgtctaagtgtgattattaatagtacttt

SEQ ID NO: 51481 - DNA, 201 bp, Homo sapiens
acataaaacttaaaaggatataatttgtttcacacctctttaacctccaccaatctttcattccacagcctcagagagctagaaagcttgagttaattacyagcaaaacatattatgttggttgtaaggcgggaagggaagaaggctatcttcctttgctatgctgtgatacaggttgctgtgcaagacattcagagggtc

SEQ ID NO: 51482 - DNA, 201 bp, Homo sapiens
gttttttagacagactgtcactgtcacccaggctggtgtgcagtggcatgatcactgctcactgcagacttgacctcctgagctcaagtgatcctcctgcrttggcctcccaaagttctgggatgtaagccaccatgcctggcctgttcattttctttgggtgtgttgacggtgttcttatgtttaaaatattctctttat

SEQ ID NO: 51483 - DNA, 201 bp, Homo sapiens
agaggaagtgattgataggctatggtaataatccaggaatgaggcattggagacctgaggagagtagtggcagtgctgtccctagggcctgtaaaagtctsaattttccattaggttatagtaatgcagttagataaatggtgctaaaattactttccataagttttatgtaatactgtgcaaaggaaaccttgttacagg

SEQ ID NO: 51484 - DNA, 201 bp, Homo sapiens
ttctaagttatatgtgaacatagctgggcatggtggggcatgcctgtaatctcagctgctcaggagattgaggtgggaggagcatttgaacctaggagttmgagaacagcttgggcaaaatagcaagaccctgtctcaaaaaaaaaaaaagttataaatctgaccaggtgtggtggctcatgcctgtaatcccagcacttt

SEQ ID NO: 51485 - DNA, 201 bp, Homo sapiens
tcttggattcaggcaatccacccaccttggcctcccagagtgccaggattacaggtatgagccaccgtgctcagccgagaacaatagtttttaacttagaraattgtataaaataaatcattcagaagagcgttgcaaaaagaacagaaaaatattattttgtacttaaaaatatagttgtttagttgctaaatgttgaga

SEQ ID NO: 51486 - DNA, 201 bp, Homo sapiens
cgaccatggctcactgcagccttgacttcccagtctcaagtgatcctcccacctcagcatcccaagtagctggaactacaggcacatggcaccatgcccarctaatttcttaatttttcttatagagacggggtatcactatgttgccagggctgttcttaaactcttgggctcaagcaatcctcctctctcagcctccca

SEQ ID NO: 51487 - DNA, 201 bp, Homo sapiens
tgttggccaggttggtctcgaacttctgacgtcaggtgatccgcctgccttggcctactaaagtgctgggattacaggtgtgagccaccgtgcctggcctwtgttagttgcttttgttgcgtgtagtggtatttcattgtgattttaatttgtatttctctgttgactattgatattttgtaagctttggattttatttat

SEQ ID NO: 51488 - DNA, 201 bp, Homo sapiens
atgttcgaaccatacatcattttctttagctttttttttttttttttgagacaggatcttggtctgttgcccaggctggagtgcagtggtgcgaccatggstcactgcagccttgacttcccagtctcaagtgatcctcccacctcagcatcccaagtagctggaactacaggcacatggcaccatgcccaactaatttct

SEQ ID NO: 51489 - DNA, 201 bp, Homo sapiens
aatttctctttttaaaaatattgaagtattggttacataaaataaaattattttacgtgtatgttttgatgaattttggcaaatgtatacagctgtgtaamcatcaccaccatcaaagtagagagcagttccctcaccctaaaaagtttccttataaccttttgtggttgatctccctgctgcccagtatactcccttctc

SEQ ID NO: 51490 - DNA, 201 bp, Homo sapiens
cacaatcacactgctcactgcagccttaaccatccaggctcccaagtagctgtgaccacagacgtgtgccaccacactcagctaatgttttttttttttttggtagagacagggtctcactttgttgcgcaggcttatctcaaactcctgggctcaagtaatccttctgcctcggccttccaaagtgttgggattataagt

SEQ ID NO: 51491 - DNA, 201 bp, Homo sapiens
attatcagaactattaggcatgttttccatctatcaactgaagtaccccaccagttttagatctagaatgtttaattcttaccctaaacaagattcaattkttaccatgtcttttgcatatctttataatacccattttttgagttcatgctctgtgttaggtcctgtattggacgtttggcatatagtataatgttattt

SEQ ID NO: 51492 - DNA, 201 bp, Homo sapiens
cctggcggtttttaggtttttattgttgttgtttcagacagggtctcactctcttgcccaggctggagcacagtgttgcaatcttggctcattgcaacctstgcctcctagttcaggagatgctctcacctcagcctcctgagtagctgggactacaggcacatgccaccacacccagctaatttttttcgtatatttttt

SEQ ID NO: 51493 - DNA, 201 bp, Homo sapiens
gtttctaaacttagttcaaaaaatacatatctcttaaacctgaaactggaaaatgtattagttcttgttctttattttatgaaattcagcatgaaaacgtwgattactttctaaagtatttgtacaggctgggtgcagtggctcacgcctgtaatcctaacactttgggaggccaaggtgggcggattgcctgagctcagg

SEQ ID NO: 51494 - DNA, 201 bp, Homo sapiens
tttttatgggcattaggtaaagtttctaaacttagttcaaaaaatacatatctcttaaacctgaaactggaaaatgtattagttcttgttctttattttawgaaattcagcatgaaaacgtagattactttctaaagtatttgtacaggctgggtgcagtggctcacgcctgtaatcctaacactttgggaggccaaggtg

SEQ ID NO: 51495 - DNA, 201 bp, Homo sapiens
aacatagtaagtgctcaagaagtattcattataaccacatgactaaaattatttcgatttgtctcacaattcctacagaacttttattgtatcttgtactrtcattatttctatgtcttatctccttcctagattgtaaattctttgaagctagaaactagatattactcatccttatacactgctctctctccaccacca

SEQ ID NO: 51496 - DNA, 201 bp, Homo sapiens
ttagttatttcctttttatgggcattaggtaaagtttctaaacttagttcaaaaaatacatatctcttaaacctgaaactggaaaatgtattagttcttgktctttattttatgaaattcagcatgaaaacgtagattactttctaaagtatttgtacaggctgggtgcagtggctcacgcctgtaatcctaacactttgg

SEQ ID NO: 51497 - DNA, 201 bp, Homo sapiens
tccagtcattcaagatgtttctaagttcttacgatttctacaaagctttttctaataaattctatgattttcatcttttcactctttcatatacaagtaayggtataatagttttatttattgagcacttagtataggcaaggcattgttctaagggcatttctgtggtttttctcattgaatcctcacaaacatcctaag

SEQ ID NO: 51498 - DNA, 201 bp, Homo sapiens
aagctttccttttcacttacctaatttatctcattatttaagcttcttttgctctgacctagtctcctatccagtcattcaagatgtttctaagttcttamgatttctacaaagctttttctaataaattctatgattttcatcttttcactctttcatatacaagtaatggtataatagttttatttattgagcacttag

SEQ ID NO: 51499 - DNA, 201 bp, Homo sapiens
aatggaataattttttttatgtctcaaatctgcaaatgaatttatttcctagcactgctcattttgcttttaaatcatgatgtccttgtgtctgatcattsactttgcccttactctctttttgaaaaagttcttattttacaacagaaatgtctggtgtgggaaatagttattgaagtatttttggttcttccaccagcc

SEQ ID NO: 51500 - DNA, 201 bp, Homo sapiens
tagaacaggtgaacctcataagtctctggaaaggggccagggatgaatgtcttatacatgttagtattgatctgaaggagaattggtttggggtttgggtmcatcaaatggaaaaggtcagcagaagatgtgtgtggcactagtaaggaggataattgacatcaaatgctttccatggaatgtcatggtttggactgttct

SEQ ID NO: 51501 - DNA, 201 bp, Homo sapiens
agaagatacttcaggcaatactacacattcccttggtgctgaaggtagccttgtgcttttttcagaataatagactgttctaacttccctttaacatgatkgtgcagatgtctaaatttctcctctttattaggttgcagatttctcataattaaattgagagtcattaagaaatttgctagtaatttaaaatgttccacc

SEQ ID NO: 51502 - DNA, 201 bp, Homo sapiens
tcattctacaaatttttttgagtattttcttttttcttttttgaaacggagtcttgctttgttgcccaggctggagcgcagtggcaccaccatcttggctyactgcaacttccacctcctgagttcaagcgatccttgtccctcagcctcctgagtagctgggattacaggcaagtgccaccatgcctggctaatttttgt

SEQ ID NO: 51503 - DNA, 201 bp, Homo sapiens
tgacctcaggtgatctctccgcctcggcctcccaaagtactgggattacaggagtgagacaccgtgcctggccgcaaatatcctgtatcaacctttttatkcagtcagtctgaaccacttgcctttttctcattcttgtattttttgtttaggctgttcatttttccttgaatactctgttttccttaactcatctaagga

SEQ ID NO: 51504 - DNA, 201 bp, Homo sapiens
agctggacgtggtggcgcatgcctgtagtcccagctactcgggaggttgaggcaggagatcgcttgaacccaggaggcggaggttgcagtgagctgagatyacgctactgccctccagcttgggtgatagagtgagactgtctcaaaataaagaaataaataaataaaattacaagaaatgtttgtatgtttatacttact

SEQ ID NO: 51505 - DNA, 201 bp, Homo sapiens
tggggtacataatggaaccccatctttacaaaaaatacaaaaattagccgggtgtggtggtgtgtgcctgtagtcccagctactcaggaggctgagatggraggatcaattgagcccaggaggcagtgagccgagatctcgccactgcgctctagcttgggcaacagagcaagcctcttatctcaaacagaaaaaaaaaaa

SEQ ID NO: 51506 - DNA, 201 bp, Homo sapiens
tagctggacgtggtggcgcatgcctgtagtcccagctactcgggaggttgaggcaggagatcgcttgaacccaggaggcggaggttgcagtgagctgagawcacgctactgccctccagcttgggtgatagagtgagactgtctcaaaataaagaaataaataaataaaattacaagaaatgtttgtatgtttatacttac

SEQ ID NO: 51507 - DNA, 201 bp, Homo sapiens
tagtgaaccctcgtttcttgcttctttattatctgtactgttgtccacttggcaattgttcaggcctctgtgttgttactgatttttgtatgtatatatawatatatgtcttgtttttccaactagattgtgagctccttaagggcagagccatgaattatacctctttgtatccccagtgccttgcatacagtaagcact

SEQ ID NO: 51508 - DNA, 201 bp, Homo sapiens
ttctagactaggaaggcagatgtgtcatactcatgctataatttctctatgctgtgcccatagcgaacattgctgattggtcttagaatcttttcccactragtctgggatttagcctccagaaggcttcttaaaactgagcaccaggcagctactaccaatttatcaaagtaggcatccgagataaagccagtttgactt

SEQ ID NO: 51509 - DNA, 201 bp, Homo sapiens
gtccaaaacactgcggtggagggtgtgaccagaggggccccaggggctgcatagagctccgctgcctcagggagactgcggaacgccatggagtgtgcagkaaggatgggcaagcgagatgttagtagagcgagaggatacggacacatggcatggaagatgcaggtgacaagggcgcagatctcaggaagtgcacactag

SEQ ID NO: 51510 - DNA, 201 bp, Homo sapiens
aacttttaggggtcaaaggttcacctaaatgtccgtaaatacaagtactagatgtaatgattttgatttagacaagaataggtcattttattaggtcatgytcatataaacttctcttagcctctggctatataactcatccatccctggtcttacctataggtggataaaacaaaacagtaggaagattctgtcacacta

SEQ ID NO: 51511 - DNA, 201 bp, Homo sapiens; identical to SEQ ID NO: 9039

SEQ ID NO: 51512 - DNA, 201 bp, Homo sapiens
gagctaccacacctggccactggattttaatacctgctttatgaatgctagctttttttttttttttttttttttttttttttgagatggagtctcactcygtcacccaggctggagtgcagtggtgcaatctcggcttactgcaacctccgcctccaaggttcaagtgattctcctgcctcagcctcccaagtagctggg

SEQ ID NO: 51513 - DNA, 201 bp, Homo sapiens
aactgtgatgaaggacccttgaattgtcgaaggtgtctaaggatccaccactgaaagaggaggttagaagaggtgcaagaggaaggcactattataggctstttccttggttatgcactggagtcagcacaaggcaaaagatagtataaatctcaaatggtttgaaaagtatcggctaagtttaaaccagttagggaattc

SEQ ID NO: 51514 - DNA, 201 bp, Homo sapiens
aatacaaaaattacctggctctggtggtgcgcacctgtagttccagctactcgggagactgaggtgggaggatcagttgagtccaagacattaaggctgcmatgagccgtgattaagccactgcactccagcctggctggcagagcgagaccttgtctcaaaacaaaacaaaacaaaacaaaacataggaaatgaatgcct

SEQ ID NO: 51515 - DNA, 201 bp, Homo sapiens
aaccaatttggacatggccctgaaaatcctttttgcacagaaaggggaaaataagagtactggcagaatgtcagatgctggggatgcctcaccctctagtytcatgactatgacacatgagacggtgttccgctgtacctctgccccccccccccccgtttgtggatctgaatctggaaaagagcttggagagatttacag

SEQ ID NO: 51516 - DNA, 201 bp, Homo sapiens
cgctctcggcgcctcctctgcctgggctcccactttggcggcacttgaggagcccttcagcccaccgctgcactgtgggatcccctttctgggctggccarggctggagcccgctccctcagcttgcagggaggcgtgcagggagaggtgcgagcagcaaccggggctgtgcgcggcgcttgcgggccagctggagttcct

SEQ ID NO: 51517 - DNA, 201 bp, Homo sapiens
gcctggccaacacggtgaaaccccatctctactaaaaagtacaaaaattagccgggtgtggtggcgggcacctgtaatcccagttactctggaggctgagscaggaaaatcacttgaacctgggaggtggaggttgcagtgagcggagatggtgccactgcacttcagcctgggtgacagaacaagactgtgtctcaaaaa

SEQ ID NO: 51518 - DNA, 201 bp, Homo sapiens
agactttctgtttcatctttttggagaaacctcttttggaccctcctgatttctaatctgtactgttgccctctatgcctggtgcataactgttaacctcygttcactgtcatccgtggagattctccttacctgtctgtgttggatacctcttgggtttcatatcttcttgcttggtttactccctcattttggtggggg

SEQ ID NO: 51519 - DNA, 201 bp, Homo sapiens
ttgagttcaggtgtttgaagctgcagtgaactatgattgtgccactgccctctggcctgggtgacaaagcaagaccccatcttgaagaaaagaaaaaagaraagataagatcattagttattctacctcagaaataacaactcttagctttttttttttttttttttttttttttttttttttttgagatgaagtctcgct

SEQ ID NO: 51520 - DNA, 201 bp, Homo sapiens
ggtggttgggtcttattgtttttgggatttgctgtaatgtgatccgctgagacattttattgggagtcccataatgtcagtatcttgattcatcttggccyggtcagatcccttaggaaaatgtctgatctcctatttgcagggtattggcctggctgtactagaggtctattaatggaagcgggctttgggtgggaaggg

SEQ ID NO: 51521 - DNA, 201 bp, Homo sapiens
accttttccagattttttttgcagttctcttttcttctgttctctttttcttgaagttttgtgcttaagaaaaatccctttaccattacttaatgggattkcagaaaactctgaatatgtgtatatttagttctccatttctattaagttccctacttttttcattatatgtcaaacttattcttgttattcttaatgggt

SEQ ID NO: 51522 - DNA, 201 bp, Homo sapiens
ttaactgagatcacttggttgagttggtgaataccaggtttcttcactgcaaatttaccacttttctctttgtaataattcagtacattttagggagataytttgagatcatgtatataccctctttcaccatattatgagttttagcattaatgatatttattttgaatcatctttattgtgaaacatagcacacataaa

SEQ ID NO: 51523 - DNA, 201 bp, Homo sapiens
aatagattaccttttccagattttttttgcagttctcttttcttctgttctctttttcttgaagttttgtgcttaagaaaaatccctttaccattacttamtgggatttcagaaaactctgaatatgtgtatatttagttctccatttctattaagttccctacttttttcattatatgtcaaacttattcttgttattct

SEQ ID NO: 51524 - DNA, 201 bp, Homo sapiens
gggggaagtgggtggatatagatgaaataagattgagcatttgtttgaaaaaaaaaaatttcaacaaaagaagattgagcatttgttgctaattgttgaargtgtattatataagtacatagcttttaaaattttttctgttaataaaaagacagtatcttcaagctttttgttataagcaaccagaagggtgaagttgcc

SEQ ID NO: 51525 - DNA, 201 bp, Homo sapiens
gaaaaaagaatttcattccttttttatttatttatttatttatttttctttttgagatggagtttcgtacttgttgcccatgctggagtgcaatggcatgwtcttggctcactgcaaccttcgcctcccaggttcaagcgattctcctgccttagcctcctgagtagctgggattacaggcatgcaccaccatgcctggca

SEQ ID NO: 51526 - DNA, 201 bp, Homo sapiens
ctcaggaggctgaggcaggagaattgcctggagaattgcttgaatctgggaagttgaggctgcagtgagccatgatcatgccacagcactcagcttgagcracagagtgagaccttgtctcaaaaaaaaaaaagaatacctttacaacatagcttttaagttaaagatttgattttacttaataagcatgtgtaaaacccc

SEQ ID NO: 51527 - DNA, 201 bp, Homo sapiens
ttctacaaatggtcaaaaatagccaggagtggtggtgtgtgcctgtagtcccagctgctcaggaggctgaggcaggagaattgcctggagaattgcttgawtctgggaagttgaggctgcagtgagccatgatcatgccacagcactcagcttgagcaacagagtgagaccttgtctcaaaaaaaaaaaagaataccttta

SEQ ID NO: 51528 - DNA, 201 bp, Homo sapiens
agtctggtgaggacgtggagaacctttatgtctagctcagggattgtaaatacaccaatcggcactctgtatctagctcagggtttgtaaacacaccagtsagcaccctgtgtctagctctgagtttgtgaatgcaccaatccacactctgtatctggctgctctggtgggacgtggagaacctttatgtctagctcaggg

SEQ ID NO: 51529 - DNA, 201 bp, Homo sapiens
ggtaatactattttagccttttttgttgttgttgttgttgagacagggtctcatgctatcacctaggctggagtacagtggcatgatcccggctcactgcwgccttgacttccaagctcaagtgatcctcccacctcagcctcccaagtagctgggactacaggtgtgcactcccacgcctggctaatagttttattttca

SEQ ID NO: 51530 - DNA, 201 bp, Homo sapiens
atcccctatctctctttagagaaacagctgtgcctggccccttgggcatagaggacatttcacctaacttgtcaccagatgataaatccttcagccgtgtygtgccccgagtgccagactccaccagacgaacagatgtgggtgctggtgctttgcgtcgtagtgactctccagaaattcctttccaggctgctgctggcc

SEQ ID NO: 51531 - DNA, 201 bp, Homo sapiens
ttttttttgcctcttgcttgcaaattatttgttgaaggtacagattgttgtatggttttctacattctggattttgctgatcgcatctttatggtatttartacagtcctctgtccaccttatttccagtgaatcttccttgagaattttaaattatgctaattcaaaacaagtatggagaatttgcattttggtgtaagg

SEQ ID NO: 51532 - DNA, 201 bp, Homo sapiens
gtggtgcacacctgtaatcccagctactcaggagggtgaggcatgagaatcgcttgaacccaggagacacaggttgcagcaagtcgagattacgccgctgyactctagcctgggcaacggagtaagactctgtctccaaaaaaaaaaaaagttactcattgtattgtatttcttgccaatcttattagtcttttataggaa

SEQ ID NO: 51533 - DNA, 201 bp, Homo sapiens
tttaattttgtattattacatacttttttaacttcttatatgggcagagatgaatttggattcagaagtttaattttcatttaagaatgttactgctggcygggtgtggtggctcatgcctgtaatcccagcactttgggaggctgaggtgggtggatcacctgaggtcaggagttcgagaccagcctggccaagatggtg

SEQ ID NO: 51534 - DNA, 201 bp, Homo sapiens
cactttgggaggccaaggtgggcggattgcctgagctcaggagtttgagaccagcctggctaacatggtgaaacccatctccactaaaatacaaaaaattwgccaggtgtgtcgtgtgtaccagtagttccagctactcgggaggctgaggcatgagaatcgcttgaacctgagaggcagaggttgcagtgagccaagatc

SEQ ID NO: 51535 - DNA, 201 bp, Homo sapiens
aagccaggttctagaggatgattctggttctcacttcagtatgctatctcgacaccttcctaatctccagacgcacaaagaaaatcctgtgttggtgagtrataccttgtttgaagaagattgagcagatttttttttttaaaccgaaaaccagcaaacataagtatttagaagatcattaccttctcaataaagttgatt

SEQ ID NO: 51536 - DNA, 201 bp, Homo sapiens
cttgggtaaatgcctacaagcagaatgcctaggttatatagtaatgaatgttcaactttataagatactgccatactgtttttccaaagtgggtgtaacaytttgcattcccagcagcaatgtacgagagttgcagttgttcaacatcgttgctaatcctgggttttgtgaacctttttttttttgtctttttttgggaca

SEQ ID NO: 51537 - DNA, 201 bp, Homo sapiens
aggaagcctactgtggtatctgcgtagtagtcactcaaaagttgatgtgctagtgtcactgattagattggtattgtctgtattcctgattttgtattaargtttgttggtaaatgtctttcatgctaatatccagttatttttttcagaccctgtggattcttctaacttggacacatgtggttccatcagtcaggtcat

SEQ ID NO: 51538 - DNA, 201 bp, Homo sapiens
tttgcttattttatacttctgttttttttaaatcattttttctttctttcttttttcttttttttttttttttcagaaaccccatttcatttcactttgcytaaagaaggtgatatcatcccaccattgactggtgcaaccccacctcttattgggcacctaaaattggagcccaagagacacagtactcctattggtgag

SEQ ID NO: 51539 - DNA, 201 bp, Homo sapiens
cagccggccggccctgccggccccccgggcaatgaggggcttagcacccgggccagcggctatggagggtgtactgggtcccccagcagtgctagcccacyggcgctgcgcttgatttctcgccgggccttacttagctgccttccagtggggcaggactcgggacctgcagcccgccatgcctgagccttccaccccctc

SEQ ID NO: 51540 - DNA, 201 bp, Homo sapiens
cacgatctcggctcactgcaagctccgcctcctgggttcacgtcattctcctgcctcagcctcccaagtagctgggactacaggcacctgctaccacgccyggctaattttttgtatttttagtggagatggggtttcaccatgttagccaggatggtcttgatctcctgacctcgtgatccgcccgcctcagcctcccaa

SEQ ID NO: 51541 - DNA, 201 bp, Homo sapiens; identical to SEQ ID NO: 9032

SEQ ID NO: 51542 - DNA, 201 bp, Homo sapiens
atgggagcgcctatctttcaccctagggctccagcagcacttgtttttttgtttttttgttttgttttgttttttgggtttttgggtttttttttgtcccrtttgcctttgctttggagatagtacaggaaagaaaggaacacagtatcagattcagcaaggctgcctgtgagccacgttctgattgggcagtgtctgcat

SEQ ID NO: 51543 - DNA, 201 bp, Homo sapiens
ctttgagaggctgaggcggatggatcacttgaggtcaggagtttgagaccagcctggccaacatggtgaaaccccatctctactaaaaacagaaaaattakctgggcctggtggtgcgtgcctgtaatcccagctattcaggaggctgaggcaggagagttgcttgaacctgggaggcggaggttgcagtgagctgagatt

SEQ ID NO: 51544 - DNA, 201 bp, Homo sapiens
atctgcccgacttggcctcccagagtgctgggattacaggcgtgagctaccgcacctggcttttgtgtgtgtgtgtgtgtgtgtgtgtgtgtgtgtgtgayggagtctcactctgctgcccacgctggagtgcagtggcacgatctcggctcactgtaacctacgcctccagggttcaagcaattctcctgcctcagcctc

SEQ ID NO: 51545 - DNA, 201 bp, Homo sapiens
gtagttgggactacaggtgctcgccaccatgcccagctaatttttgtattttttaatagggatggggtttcaccatgttggccaggctggtcttaaacttytgacctcaggtggtccacccacctcagcctcccaaagtgctgggattttaagtgtgagccaccaagcctggcctaaaatattctctatattttagacaca

SEQ ID NO: 51546 - DNA, 201 bp, Homo sapiens
gggactgtagggacacaataccatgcctggctaatttttaaagtttctgtagacatggggtgtagccatgttgtccaggctggtcttgaactcctgggctyaagcagttttcccacctcagcctccccaaagtgctgggattacaggtgtgagccaccatccctggctgagccacgatgcctgactgttttgtgaactatt

SEQ ID NO: 51547 - DNA, 201 bp, Homo sapiens
gtggtcatagacctgttggtaagaaatgcacctttattttttagtgggattcattatagactcattacaaatgtcagctcagtattggcatttagtgactrtttgttatcttgaatggcatactatgctgactttgtttacatctaataatgagagagattagacagattttctagaattaaagatctgggacctttgttg

SEQ ID NO: 51548 - DNA, 201 bp, Homo sapiens
gctaaacaagggtcaaggaagatgaatgggggattctggggtgtctgtaaagggaagcagggagacccggggtatgcagaaaggggaacacaaatgaagasagtgaatttttgcgtgagagatgattgatcactaagaggagtccctcatttctttagtgcatgtcaacagctatccacaaacaaccctcttctcaaggag

SEQ ID NO: 51549 - DNA, 201 bp, Homo sapiens
aggggggttgggaggcaggtgcaggtttcattcaatatgtagattttcatttaatctccgtattttcagtattgtacttcctgataactgtgcctcttgtstgccagtcctgggacactctgttttactctctccagggcagaggaggggcagggtgagattatgggtgttggaactgtggtgtaactctggtggtttgtt

SEQ ID NO: 51550 - DNA, 201 bp, Homo sapiens
tttgcttttgtaaaaatctttacttagtcttctttcacttgcttgggtcacggttcccaactttgcaaatttatattttcacctcttttgtgtttattacrgttacgcttaatgctctttttatgaaatattagttgtgtagaaagttgcaaggaagcaaagatgtcatctgtaatcctgccacccagaggctaattgctg

SEQ ID NO: 51551 - DNA, 201 bp, Homo sapiens
tgcaaccatcaccatgatctaatttcagaatagtttcatcacctcctcaaaacccatgccctttagcactcactcaacatttcttctaccctcggcccttmgagggtagtctactttctgtctctatagatttgtagacaccagtctacaaatggaaagtagacaccagtctactttctgtctctatagatttgcctattc

SEQ ID NO: 51552 - DNA, 201 bp, Homo sapiens
ggtagaaagagaaaactgcctcatattgaatgcctactatgtatatgtttggcactgtgctaggtgctttccctattgacagctgctctggctagaattcwatcctggatccaactgccacttaaataatatacccccacccctcaacaacaacaacaacaaaacaaacacatatgccacatggggcttagttcattaaga

SEQ ID NO: 51553 - DNA, 201 bp, Homo sapiens
tcacagaaagtcctcgtgcctccatgggagttctctcaggcaaaagaaaacttatcacttctgaagaggaacggtcccctgccaagcgaggtcgcaagtcwgccacagtaaaacctggtaagtgctcctttttgcctcattcttccttcagaccatggcagaatgcagggtcagctgctggaaaaatggagcttaatatgt

SEQ ID NO: 51554 - DNA, 201 bp, Homo sapiens; identical to SEQ ID NO: 9034

SEQ ID NO: 51555 - DNA, 201 bp, Homo sapiens
tctgttcagtcattaatttcatcctctgtcatccctgtatctggcctttcaccaaagctcctaggagtactaagtggtaaaactgccgattttcatcattrgggataaatggaggaagccatgacatgagtaattctaaacagaaacattctcaaaagagtgagtagcctgctttacaggaagccagtcacatcaggaaga

SEQ ID NO: 51556 - DNA, 201 bp, Homo sapiens
tattccagttatagcagtaatagattctagatttttcaggacagtttcaaggagtcagtccttttgttcccataagtaacgtgtattcagacaacatgctwtgaatttggtttggaaaataggatcactgtaatttatagcagcagtgagaagactggtaggaagctccacttcagctttgcctatatcacgtgctgaatt

SEQ ID NO: 51557 - DNA, 201 bp, Homo sapiens
ctttctctgtcacccaggctagtgtacagtgagtggtacaataatagctcactgcagccttgaactcctgtggctcaaggatcctgctgcctcagcctccygagtagctgggactgtagggacacaataccatgcctggctaatttttaaagtttctgtagacatggggtgtagccatgttgtccaggctggtcttgaact

SEQ ID NO: 51558 - DNA, 201 bp, Homo sapiens
tttacaatatcacaaaatcacaaatactttgtctttcttctcatcagttccttctcaaagatccttcataatatgccctaacttccctttccaacattacstcctgcaaatatcctgtttttattttatttttaaaattttatttatttattttttgaaacggagtctcgctctgtcacccagactggagtgcagtggcac

SEQ ID NO: 51559 - DNA, 201 bp, Homo sapiens
gccacaggcacagcactggggaaggaggtgaggacttaggagctggtagccacgaaggtcacttagtggttggctactggcattcagagatttgagatttrtacggggcgttcagaaagctccccgtgctggttcagggaccataaagaagatacagcaagatagggacgtggattctccagggatggtgaggactttcag

SEQ ID NO: 51560 - DNA, 201 bp, Homo sapiens
cgcctggcctgaattgtttagtttaaaatgggttaattttatattgtgagtttcatttaaaaaaaggtatttatagctttacgttagtgatgttttatctrtgagactttgtaaaatgacttattttttgcaacaagggaaaaaatacatatgtcttgcagaagatgtggtcatgcttggtggcttacacctgtaatacca

SEQ ID NO: 51561 - DNA, 201 bp, Homo sapiens
ttacacttaggcctagagtgaatgctggtccgtactgctgaaccatgaaacccttggatttctatgctagaaccagtcagtatcttgaagtcctttaaccygtgagatcctctgtcatctctttgattagattgtacattataagtattaacttcaaactttgctttggagaatcctacagactattaaggcttataaaca

SEQ ID NO: 51562 - DNA, 201 bp, Homo sapiens
taatagttaataatgatcaggggatctagatgtgttttaggctctagctataacctttatttgcttacttgatagaatgccatcttaattggctattaatrtcagaggcagacttttggggtagacttcatgcatgatatcgccggatatataaattcttacatttttaactagatggcttttaataaattcttaggggta

SEQ ID NO: 51563 - DNA, 201 bp, Homo sapiens
tttcacgccctctcaaggtcccttcggttcaaggataccgtcattctccggctctactaaaggggagggcctgcaacgtccatgctgccatggaaacgcgscgccgtgttcctttttcttacgtggggcagggcactctgccgcagctacctatcatccacgggatttcttgagtggcgggcggcggcagcgaatggacga

SEQ ID NO: 51564 - DNA, 201 bp, Homo sapiens
tctctctttagagaaacagctgtgcctggccccttgggcatagaggacatttcacctaacttgtcaccagatgataaatccttcagccgtgtcgtgccccragtgccagactccaccagacgaacagatgtgggtgctggtgctttgcgtcgtagtgactctccagaaattcctttccaggctgctgctggcccttctgat

SEQ ID NO: 51565 - DNA, 201 bp, Homo sapiens
gaacagtctgattaatagctgatctaattaatagctgacctcccaaatctgacaggatagacactgccacgtgcaaggcctgccagcccctcagacgcacmaaatgcgtaaaacaaatgcatcctttcctggctaagcgagtattactctcttagccctgcaccaaacctccaatctagccacatttaactcttcatttct

SEQ ID NO: 51566 - DNA, 201 bp, Homo sapiens
aggagaacagtctgattaatagctgatctaattaatagctgacctcccaaatctgacaggatagacactgccacgtgcaaggcctgccagcccctcagacrcacaaaatgcgtaaaacaaatgcatcctttcctggctaagcgagtattactctcttagccctgcaccaaacctccaatctagccacatttaactcttcat

SEQ ID NO: 51567 - DNA, 201 bp, Homo sapiens
ctattaggcatgttttccatctatcaactgaagtaccccaccagttttagatctagaatgtttaattcttaccctaaacaagattcaattgttaccatgtsttttgcatatctttataatacccattttttgagttcatgctctgtgttaggtcctgtattggacgtttggcatatagtataatgttatttaatcctattc

SEQ ID NO: 51568 - DNA, 201 bp, Homo sapiens
aaggggcggggagagaagaggttaggaaggaggggaaagggtgtctacgagaaggtgatgaaaaatagggagggatagtcaggcttattgtaaataacgasgaatggtgacttggtaggcatgataggaaagtgcttgcagcaattataaatataatattctaattggaggagtcctgaagtggtcccgtttcccagctct

SEQ ID NO: 51569 - DNA, 201 bp, Homo sapiens
attccctgctatcgtggagattgtgttttaaccaggttttaaatgtgtcttgtgtgtaactggattccttgcatggatcttgtatatagttttatttgctkaacttttatgataaaataaatgttgaatctctttggttgtagtaactgggatttcttcatctgtttttttgagcttaatctcagaacaaatgacaagaca

SEQ ID NO: 51570 - DNA, 201 bp, Homo sapiens
catgaattatacctctttgtatccccagtgccttgcatacagtaagcactcaataaatatttaatgatgatgacctgctctgttattctgcttttccctayggatacatctatgccacataaggacagcatctacccatcacagtagttcttggttgttttcagccagccctctggagtggcatctattaatatatatctt

SEQ ID NO: 51571 - DNA, 201 bp, Homo sapiens
acaacttgatctcaattttttcttaaggacctttttcttggagaataatactttttttttttttttttttttttgagacggaatttcgctcttgttgcccrggctggaatgcaatggcacaatctcagctcactgcagcgtctgcttcccaggttcaagcaattctcctgtctcagcctcctgagtagctgggattacagg

SEQ ID NO: 51572 - DNA, 201 bp, Homo sapiens
gacaatgagtaaacaaatgggcacggctgtgtttcagtaaaactgtacaaaaacagacagcaggccatagtttgccagctcctgctccagagacagcagtrgaaagggtgatctttagttgataatagcagggaataagttgtcagagcttcccagtgtgtgtagaatatgtagtgatgaaaaccagatgcagtgactata

SEQ ID NO: 51573 - DNA, 201 bp, Homo sapiens
aaatatttcaggctttgtgggccatttgatccatcacaactactcgcctttgctgtgagggcatgaaagcaaccatagacaatgagtaaacaaatgggcayggctgtgtttcagtaaaactgtacaaaaacagacagcaggccatagtttgccagctcctgctccagagacagcagtggaaagggtgatctttagttgata

SEQ ID NO: 51574 - DNA, 201 bp, Homo sapiens
tcttcatctgtttttttgagcttaatctcagaacaaatgacaagacatagtactttctctgagtctttcaacaggcttattcacttacggaggacagctgrccaaggaaattgaaaagttaagagtgaactttattctgtggcatcattcccaaaaggttattccagggtgtctaaaatgctatgcttgcagaaactcagt

SEQ ID NO: 51575 - DNA, 201 bp, Homo sapiens
ttcttcatctgtttttttgagcttaatctcagaacaaatgacaagacatagtactttctctgagtctttcaacaggcttattcacttacggaggacagctsgccaaggaaattgaaaagttaagagtgaactttattctgtggcatcattcccaaaaggttattccagggtgtctaaaatgctatgcttgcagaaactcag

SEQ ID NO: 51576 - DNA, 201 bp, Homo sapiens
aatctaggtgagagagtaaagctttctagaaattggaatgtctgtgggataaatttgagtgggtttgaaatgacttcaggagtttatctagtttatttccmtaggttacattggctaggaaccttttgcaaatgtgtgaagatttgtatataggttcaatattctcaacctgtaaagtcagagaactaagttttaagcaag

SEQ ID NO: 51577 - DNA, 201 bp, Homo sapiens
gttgtggatagctggggagtggaaaagggggcagtaagaaggaggcataaggtagcaaataagaaaaccactcagtaattattatcttggtttttttttttaatatagaatttttggaaattcctcctttcaacaagcagtatacagaatcccagcttcgagcaggagctggctatatccttgaagatttcaatgaagccc

SEQ ID NO: 51578 - DNA, 201 bp, Homo sapiens
tcagttttcaatgcataaagtagttttacataattggcatgttgtgtatatgactcagttttttttttttatgtaacagtgtattttcccttgtcagttakattttagatttaatgcatttgcttaatatgtatgtacatcagtgtttgtgaaactatatgtgctttttgtatttatttgtttttttgcttttctcttaac

SEQ ID NO: 51579 - DNA, 201 bp, Homo sapiens
ttagaaaacattcttttggggggaggtagaggcgccagaaggacgtggcgggggggatggaaaaaggggcggggagagaagaggttaggaaggaggggaargggtgtctacgagaaggtgatgaaaaatagggagggatagtcaggcttattgtaaataacgaggaatggtgacttggtaggcatgataggaaagtgcttg

SEQ ID NO: 51580 - DNA, 201 bp, Homo sapiens
tgccccctgctccacggcacctagtcccatcgaccacccaaagggctgaggagtgcaggagcacggcacaggactggtaggcagctccacctgcagccccsgtgcgagatccactgggtgaagccagctgggctgctgagtctggtgaggacgtggagaacctttatgtctagctcagggattgtaaatacaccaatcggc

SEQ ID NO: 51581 - DNA, 201 bp, Homo sapiens
gagatattgtagtggtcaaattgctttttcagttgctgtggtagattatcttcatttgggatctacttaggaaatcttcattattgatatacctctcattytgattgtccaagttgtttgttttgtaaaaataaaatacagttcttatttattgaacacctgtggcacatatgggatatgagcattgtgttcaagacaatg

SEQ ID NO: 51582 - DNA, 201 bp, Homo sapiens
tagttagcacactagctctgtacaagtccagatcagcctttgagacctagctgtactgaagacactgcagaagggatatgctcagagtagaatgggaaagkgtaataatgacacaggaagtaggatccaagagtaggcactgtgttcatgctatgttacttttactttattatttattattattttttaaattttatttga

SEQ ID NO: 51583 - DNA, 201 bp, Homo sapiens
caccggcgctgcgcttgatttctcgccgggccttacttagctgccttccagtggggcaggactcgggacctgcagcccgccatgcctgagccttccacccsctccgtgggctcctgtgtggctgagcctccctgatgagcactgccccctgctccacggcacctagtcccatcgaccacccaaagggctgaggagtgcagg

SEQ ID NO: 51584 - DNA, 201 bp, Homo sapiens
cccccttctatttcctataggtatccaatagtaaaagaatcagagagttattgaaactcagttttccactgtcctaattgtttctgaatttgtattagaaygctcggaagatccagattttttgtaggggttagaaagtcaccactggagagactacctggtgcaaaaatcacctttgaaagcttttaccagacttgacca

SEQ ID NO: 51585 - DNA, 201 bp, Homo sapiens
ggcaaaaccccatctctactaaaaatacaaaaaaagtagctatgagtggtggcacatgcctgtagtcccagcttctccggaggctgaggcagtagaatcayttgaacctgggaggcagaggttgcagtgagccgagatcacgccacggcactccatcctgggtgacagagtgagactccatcaaaaaaaaaaaaagtcata

SEQ ID NO: 51586 - DNA, 201 bp, Homo sapiens
gaggggaaagggtgtctacgagaaggtgatgaaaaatagggagggatagtcaggcttattgtaaataacgaggaatggtgacttggtaggcatgataggaragtgcttgcagcaattataaatataatattctaattggaggagtcctgaagtggtcccgtttcccagctcttgtacttccgccccattatttaggtttag

SEQ ID NO: 51587 - DNA, 201 bp, Homo sapiens
acttattttaaaaatatatggagtttgcttgtgcccagtagttcaaggctgcagtaagctgtgatcgtgctactgcactttagcctgggagacagactctstctctctcttttttttttttttttgagacagagtctcgctctgtcaccaggctgcagtgcagtggcgcgatctcggctcactgcaacctccgcctcctgg

SEQ ID NO: 51588 - DNA, 201 bp, Homo sapiens; identical to SEQ ID NO: 9033

SEQ ID NO: 51589 - DNA, 201 bp, Homo sapiens
ggttgtctactttgtgtcagtactatagttgttggctgtgaagagagcagagacgatagaagggagttagtcaggaggcctggtgagggtggtggcaatgwgacagaatttgggagcaaaggaaaagagtgattgaaatatttcttgcagttcttattatttttgcttattttatacttctgttttttttaaatcattttt

SEQ ID NO: 51590 - DNA, 201 bp, Homo sapiens
tgtgaacttttaaaaagttttttgagccctttctgtgctcatccaatgcatatcttctcttgtcacttgtcagtaattctcctgaatgcaagatttttctrcctcttctcaaaaatataaaattcgagtatgttggtgccttattttttctttacttaattctgtgtaggatgttgaattgttaatcttttaggtgctttt

SEQ ID NO: 51591 - DNA, 201 bp, Homo sapiens
gcttttgttgcgtgtagtggtatttcattgtgattttaatttgtatttctctgttgactattgatattttgtaagctttggattttatttattattattaktattattattactattttttgagatggagtcttgctctgtaatccagactggagtgcaatgacacgatcttggctcactgcaacctctgcctccgcggtt

SEQ ID NO: 51592 - DNA, 201 bp, Homo sapiens
gtctcgctctgtcgcccaggctggagtgcagtggcgcgatctcggctcactgcaagctctgcctcccgggttcacgccattctactgcctcagcctcctgmgtagctgggactacaggcacctgccaccacgcccagctaatttttttgtattttttagtagagatggggtttcaccatgttagccaggatggtctcgatc

SEQ ID NO: 51593 - DNA, 201 bp, Homo sapiens
ttgcttttgttgcgtgtagtggtatttcattgtgattttaatttgtatttctctgttgactattgatattttgtaagctttggattttatttattattatyagtattattattactattttttgagatggagtcttgctctgtaatccagactggagtgcaatgacacgatcttggctcactgcaacctctgcctccgcgg

SEQ ID NO: 51594 - DNA, 201 bp, Homo sapiens
tctttctgaatccttagagttagtataatgtaggtcaggcgtggtggctcacgcctgtaatcccagcactttgggaggctgaggccagcagatcgcctgargtcggaagtttgagactagcctgaccaacatggagaaaccctgtctttaccaaaaacacaaaattagccaggagtgctggcaggcgcctataatcccagc

SEQ ID NO: 51595 - DNA, 201 bp, Homo sapiens
actgtttttccaaagtgggtgtaacattttgcattcccagcagcaatgtacgagagttgcagttgttcaacatcgttgctaatcctgggttttgtgaacckttttttttttgtctttttttgggacagagtctttctctgtcacccaggctagtgtacagtgagtggtacaataatagctcactgcagccttgaactcctg

SEQ ID NO: 51596 - DNA, 201 bp, Homo sapiens
taagagaatcacttgagcctaggaggtcaagactgcagtgagccatgatcgcattactgcactccagcctgggcaacagagcaagacctgtctcaaaaaaaaaataaaataaaattcctatttgtaaccatttaaggtatttcatattgtttcctattctaaataataatatagcagtgaaccattttgtagctaagtatt

SEQ ID NO: 51597 - DNA, 201 bp, Homo sapiens
ctttactggaatcctgtaggattttctcttcgttcccagtgttctgaaatttccagacctttgggatacgtctattttcattcattgtattgggtacttgscaggccctctcaatttagaaactcaggtccttcagttcaaagaaatttatttctttaatttcttcccctttgttttctctgttcttcttctttttttaat

SEQ ID NO: 51598 - DNA, 201 bp, Homo sapiens
ctcaggctggaatgcagtggagcaatcatagctcactgtaacctcgaacttctgtactcaggccatcctcccacctcggcctcctgagtagctaggactastggcacacactatcacacctggctaattaaaaatttttttgtagagatgggacctcactatgttgcccaggctggtcttgaactactgggctcaagcaga

SEQ ID NO: 51599 - DNA, 201 bp, Homo sapiens
tctaatcaggtttctttgaactcatattttataagatgccttagccagtgcagtccatgcctcctgaaaagtctctcaagaatacctttagtaggccgggygcagtagcccacacctataattgcagcactttgggaggccgaggtgggaggatcacgtgagcccaggagtttgagaacagcctgggcaacatagcgagac

SEQ ID NO: 51600 - DNA, 201 bp, Homo sapiens
tctgactgaccagcgaacaaaaactgtgacagagatctaggatttcattcaggcagtgaaacacctacccgggaaacagagttggcattaggaaaggaagraaggtacatccatgaagttaaagtgttaggagaacagtctgattaatagctgatctaattaatagctgacctcccaaatctgacaggatagacactgcca

SEQ ID NO: 51601 - DNA, 201 bp, Homo sapiens
ggtctttggaaaggtattcctgctggttgggggggtggagataatgcctggccacaaagggagaatggacgttttgaaaaacaaggcactgttgaaggaaytgctctattttcaacatttaccaaagaccttcagaattagctaaaaaatcagcaatgaaaatttgagacaaatgagtgattctgaacatagttcagagat

SEQ ID NO: 51602 - DNA, 201 bp, Homo sapiens
acactgatttaaagaaaatggttacagatgtttatcagtgaccaaacgagacttttatggtctttggaaaggtattcctgctggttgggggggtggagatratgcctggccacaaagggagaatggacgttttgaaaaacaaggcactgttgaaggaattgctctattttcaacatttaccaaagaccttcagaattagct

SEQ ID NO: 51603 - DNA, 201 bp, Homo sapiens
tgagaagattcttccaacactgatttaaagaaaatggttacagatgtttatcagtgaccaaacgagacttttatggtctttggaaaggtattcctgctggytgggggggtggagataatgcctggccacaaagggagaatggacgttttgaaaaacaaggcactgttgaaggaattgctctattttcaacatttaccaaag

SEQ ID NO: 51604 - DNA, 201 bp, Homo sapiens
tggccacaaagggagaatggacgttttgaaaaacaaggcactgttgaaggaattgctctattttcaacatttaccaaagaccttcagaattagctaaaaaatcagcaatgaaaatttgagacaaatgagtgattctgaacatagttcagagattcttggaacctaagatgactctaatcaggtttctttgaactcatattt

SEQ ID NO: 51605 - DNA, 201 bp, Homo sapiens
tctcctgttttaaaccagataagccaatggacacgtcagtgttatctgaagaaggaggagagccttttcagaagaaacttcaaagtggtgaaccagtggarttagaaaacccccctctcctgcctgagtccactgtatcaccacaagcctcaacaccaatatctcagagcacaccagtcttccctcctgggtcacttccta

SEQ ID NO: 51606 - DNA, 201 bp, Homo sapiens
aagtttgggatagtagcccaaacttaatgcatctcctagctttttgttattctttgcaggtgtccagagcctaaagtagaggagaaggcatagcagaaatkgggtgtgctgtttttgcagcagcagtaggaagctttgtcagagggaatagacttacatgaaggagaatgtcctttacttgttatcccacgctccccactc

SEQ ID NO: 51607 - DNA, 201 bp, Homo sapiens
agtttgagaacagcttgggcaaaatagcaagaccctgtctcaaaaaaaaaaaaagttataaatctgaccaggtgtggtggctcatgcctgtaatcccagcmctttgggaggccgaggcaggcggatcacttgagaccaggagttcaagaccagcatggccagcacagtgaaacccagtctctaccaaaaaatacaaaaatt

SEQ ID NO: 51608 - DNA, 201 bp, Homo sapiens
gtcaaatgatggggatattgatactgtctacctcgtaggatgtttatgaaaggttgagttaatatatataaaatgcttagactagtgccttgcacttggtwctgcatataagggtagctgttgttggcagtgaaagggttaaaaacaaggttacctagaggtgaaatggatgttcgaaccatacatcattttctttagctt

SEQ ID NO: 51609 - DNA, 201 bp, Homo sapiens
ggcacctgccaccacgcccagctaatttttttgtattttttagtagagatggggtttcaccatgttagccaggatggtctcgatctcctgatctcgtgatscgccctccttggcctcccaaagtgctgggattacaggcgtgagccaccgtgcctggtcggtgttaacttattttaaaaatatatggagtttgcttgtgcc

SEQ ID NO: 51610 - DNA, 201 bp, Homo sapiens
agagacagggtttcaccttgttggccaggctggtcttgaactcctgacctcaagtgatctgcccatctcggcctcccaaagtactttcttttttttttttttttttttttgagacggcgtctcgctctgttgcccaggctggagtgcagtggcacgatctcggctcactgcaagctccgcctcctgggttcacgtcattct

SEQ ID NO: 51611 - DNA, 201 bp, Homo sapiens
cacctgtattcccagctacttgggaggctgaggtgagagattgcttgagcccaggaaattgaggctgcagtgagctgtgatctcaccactgcactccagarcctaggcaacagagtgaagccttgtctttaaaaaaaaaaaagaaaaaaaagaatttcatgcaattggaatcaggaagtgtgtgtggtcttttatttttga

SEQ ID NO: 51612 - DNA, 201 bp, Homo sapiens
catgcccaactaatttcttaatttttcttatagagacggggtatcactatgttgccagggctgttcttaaactcttgggctcaagcaatcctcctctctcmgcctcccagtgtgttgagattacaggtgtgggccaccgtacctggccttctttagcttttatttttctaagttatatgtgaacatagctgggcatggtgg

SEQ ID NO: 51613 - DNA, 201 bp, Homo sapiens
aatcagtgcttctcagtcttccgccccaatatttctaaggtccaaggagaatgtagagaacttcaggagttttggggtggtagaaaggggaggtggttagrgaggagaatgttagcttgagatggttaaagactattgttttttcttaaaaagaaatggtttttggctgggcgcagtggctcacacctgtaatcccagcac

SEQ ID NO: 51614 - DNA, 201 bp, Homo sapiens
atattctttttagatttctcagccccaggacataaaaactcccttctttccattgaaacataagagtttaggagtaactggtttgttttgttttttttttkttgttgttgttgtttttaatttgcaaaatgaacttttctcaccttctaccatcctgggtctgatttctggcagtttccatagtctctaagtatattcctt

SEQ ID NO: 51615 - DNA, 201 bp, Homo sapiens
actcctgacctcaggtgatctgcctgcctcagcctcccaaagtgctgagattataggtgtgagtcactgtgcccggccatatgtacaggtttttctgtgarcataagtcttcatttctctaggataaatgcccagatttgcaattgctgggtcatggtagttgcatgtttgtttttttaagaaactgccaaacttttctag

SEQ ID NO: 51616 - DNA, 201 bp, Homo sapiens
ttggagtgcagtggcgtgatcttggttcactgcaacctctgcctcccgggttcaagcgattcttctgccttagcctcctgagtagctgggactacaggcgygcgccaccatgcccagctaatttttgtagttttagtagagacggggtttcaccatgttggccatactggtctcaaactcctgacctcatgatccacctac

SEQ ID NO: 51617 - DNA, 201 bp, Homo sapiens
ctgtggtttttctcattgaatcctcacaaacatcctaagaaggaggtgttatttttatccccattttacagatgaggaaatggaggcatagagagattttkcaactaatgagatgtagaagcagaatttgaactcaggcagctgcctccagagcctgtgccttcatctgtcatgtatatgcctcctattatatcctttctc

SEQ ID NO: 51618 - DNA, 201 bp, Homo sapiens
gtcacggttcccaactttgcaaatttatattttcacctcttttgtgtttattacagttacgcttaatgctctttttatgaaatattagttgtgtagaaagwtgcaaggaagcaaagatgtcatctgtaatcctgccacccagaggctaattgctgtaaacattttggcatcttttctctctttttttgttcatttgattta

SEQ ID NO: 51619 - DNA, 201 bp, Homo sapiens
ctgtcgtccttcattgcttcttttctaccatttgcaatatttgctcttgaactttctttccctctgtttcccaaagtcatttatctggtccttccagttayatagataatgttctattttgcttttgtaaaaatctttacttagtcttctttcacttgcttgggtcacggttcccaactttgcaaatttatattttcacct

SEQ ID NO: 51620 - DNA, 201 bp, Homo sapiens
taaaattgggttttattaattacagtgcaaatgtagattatgatagtactaaaattgcttatgtgtgctggatgagtattttgcaggctcactgccaaagkctgacaatgtcacagaaagattggctataggtgtctgttaattatcctcctctttccttggttaacagtattccagccattccactgggtgatgattcca

SEQ ID NO: 51621 - DNA, 201 bp, Homo sapiens
aggagtggtggctcacatctgtaatcccagctgtttgggagactgaggcgggtggattgcttgagcccagaagttcaagaccagcctggggtacataatgraaccccatctttacaaaaaatacaaaaattagccgggtgtggtggtgtgtgcctgtagtcccagctactcaggaggctgagatgggaggatcaattgagc

SEQ ID NO: 51622 - DNA, 201 bp, Homo sapiens
agagtctcaactgttggttcaagtcaaaggatgacaggtcaatgttccaggagagaatccctgtgggagaaaaacaaagaaggttctggataaggttgcakgttgtagggtggtgagactgcaggaacactttcaagttcacagaacaggtaaggagagggagggtatatggatagttgccatgatcagcctcagtgatgt

SEQ ID NO: 51623 - DNA, 201 bp, Homo sapiens
aaaatacagttcttatttattgaacacctgtggcacatatgggatatgagcattgtgttcaagacaatgatatattttatgttatgcagattttaccatastaaaaatatatagatggtgtatagaataacagaaattgaaattggtgtgccatcttttgaagagaggttagcaaatgagaaaggctgtatgcaagttttc

SEQ ID NO: 51624 - DNA, 201 bp, Homo sapiens
tggtattggtataaagctacagaagttgaccacacatacacaaaaaagaggtaattaggtcgtgggggcactgcccatatgtatgcattaaggctgttgcsgtgagcatgggttaattataaaaggctgaaggggcagtttggccccctttccaccttcttgaatgcaccctcaccatgtgatgtctttccaccgtgttac

SEQ ID NO: 51625 - DNA, 201 bp, Homo sapiens; identical to SEQ ID NO: 9041

SEQ ID NO: 51626 - DNA, 201 bp, Homo sapiens
tgtattgctaaatatcccctgatgtactgtcttggagatcaaatgtttgtgttccatttgactccaggttcctcaggtcttgcagacttcgggctttctcwatttgcctgtcctctggttgtctactttgtgtcagtactatagttgttggctgtgaagagagcagagacgatagaagggagttagtcaggaggcctggtg

SEQ ID NO: 51627 - DNA, 201 bp, Homo sapiens
tggtggcgggcgcctgtaataccagctactggggaggctgaggtgggagaatcgcttgaacccaggaaggcggaggttgcagtgagccgaaattgcaccaytgcactccagcctgggcaacaagagtgaaacttggtctccagaaaaaaaaaaaaaaaaaaagaaggccaggacttgatcacaccattctttgactactgt

SEQ ID NO: 51628 - DNA, 201 bp, Homo sapiens
aggcacggtctcgctctgtcatccaggctgtagtgcggtggcaccatcttggcttactgcaacctctgcctcccaggttcaagcagttctcctgcctcagyctcctgagtagctgggattacaggcacctgccactacacccagctaatttttgtatttttagtggagacagggtttcattattttggccaggctggtctc

SEQ ID NO: 51629 - DNA, 201 bp, Homo sapiens
actctgtatctagctaatctggtggggacgtggagaacctttgtgtctagctcagggattgtaaatgcaccaatcagccccctgtcagcacagaccactgsctctaccaatcagcaggatgtgggtggggctagataagagaataaaagcaggctgcccgagccagcagtggcaacccgctcgggtccccttccacagtgt

SEQ ID NO: 51630 - DNA, 201 bp, Homo sapiens
ggagtgcaggagcacggcacaggactggtaggcagctccacctgcagcccccgtgcgagatccactgggtgaagccagctgggctgctgagtctggtgaggacgtggagaacctttatgtctagctcagggattgtaaatacaccaatcggcactctgtatctagctcagggtttgtaaacacaccagtcagcaccctgtg

SEQ ID NO: 51631 - DNA, 201 bp, Homo sapiens
gaggagtgcaggagcacggcacaggactggtaggcagctccacctgcagcccccgtgcgagatccactgggtgaagccagctgggctgctgagtctggtgrggacgtggagaacctttatgtctagctcagggattgtaaatacaccaatcggcactctgtatctagctcagggtttgtaaacacaccagtcagcaccctg

SEQ ID NO: 51632 - DNA, 201 bp, Homo sapiens
cccctccgtgggctcctgtgtggctgagcctccctgatgagcactgccccctgctccacggcacctagtcccatcgaccacccaaagggctgaggagtgcrggagcacggcacaggactggtaggcagctccacctgcagcccccgtgcgagatccactgggtgaagccagctgggctgctgagtctggtgaggacgtgga

SEQ ID NO: 51633 - DNA, 201 bp, Homo sapiens
gtaggaagttatttgcataattctgaaccccctccctccaacgtcctggctgaccactctcccctgccccatccttttctctttttcctttttttttttttgagacggagtcttgctctgccacccaggctggagtgcagtggtgcgatcctggctcactgcaacttccacataccagggttcaagcaattctcctgcctc

SEQ ID NO: 51634 - DNA, 201 bp, Homo sapiens
tttttgttgtcttttgtagagatggggtctcaccacattgcccaggctggtctcgaactcccaggcccaagagatccaaccacgacagcctcccaaagtgytgggattacaggcttgagacactatgtctgatggggcatttatttttgaaagcattcagatgtacatgagtccctttgcagaaaggcagtttgttggata

SEQ ID NO: 51635 - DNA, 201 bp, Homo sapiens
gacagctcactgtatccctcctcccccatcccctacagactctagtgcgggtagatagcaaggccagaattagctgagtgtggtggcgggcgcctgtaatmccagctactggggaggctgaggtgggagaatcgcttgaacccaggaaggcggaggttgcagtgagccgaaattgcaccattgcactccagcctgggcaac

SEQ ID NO: 51636 - DNA, 201 bp, Homo sapiens
gtcaggtattttgtggaatgtccctccatttggatttgtctaatattttctcattagactggagttatgggatattttaaaaataatgccacatagatggstgggtgtggtagctcatgcctgtaattccagcactttgggaggccaaagcagggggatcacttgaggtcaggagtttgagaccaggctgaaacatagtga

SEQ ID NO: 51637 - DNA, 201 bp, Homo sapiens
tatagatacttataacctttttgtccttcatttttccaaatggtaatactattttagccttttttgttgttgttgttgttgagacagggtctcatgctatyacctaggctggagtacagtggcatgatcccggctcactgcagccttgacttccaagctcaagtgatcctcccacctcagcctcccaagtagctgggacta

SEQ ID NO: 51638 - DNA, 201 bp, Homo sapiens
tgcagctccatctcccaggttcacatgtgattcttctgcctcagcttttcgagtacctgggagtacaggagtgcaccaccatgcccggctattttttttgwgttagtagagacggggtttcaccatgatggccagactggtcttgaactcctgacctcaagtgatccacctgcctctgcctcccaaagtgctgggattaca

SEQ ID NO: 51639 - DNA, 201 bp, Homo sapiens
gaatgctgaaagtaaaatcagcctaccataggggagataaggtgagagacaaaagtgtgcattttctcttcagaattacggagttagtggggtgtaggagrgaggataaagatgtgaaaaaatgtgatatagttgttattagaaaacatgtattttttcagaaatgcaggactgaaattctagcacttttttttagccaca

SEQ ID NO: 51640 - DNA, 201 bp, Homo sapiens
atttcacctctgccagtttccaagttggaattggagtggggattattcggagaaattactgaaagcttttggtaaattactaccacatgtcaggaaaaaaatgcagaattaccattattgcatttgtatatgtaattctttttaaagacttggctactttgatactgaatgctgaaagtaaaatcagcctaccatagggga

SEQ ID NO: 51641 - DNA, 201 bp, Homo sapiens
gttcagtaactgcttctaggagaaaaggtagagtcctatcactaagccgcagatatttatttgtgtgtggctagaatgggatgttttgaatcttctgttayaaccttgggaacgtggctgttatttcaatttatgagccagaaattttcacatcccgaaactacaaaagagaaaaagagccttattaagtgtcatgctttc

SEQ ID NO: 51642 - DNA, 201 bp, Homo sapiens
ttagagttctgactaatgttgtcttgcaagagggaattgaattaggcaacatggttgtcataatttgcaccactggacatctgtgagggttggcatttcargtgtgtggatgactctttcctaattaaccaaaactatatctcaccgactgcagccatgtgtagatatgtacaaggacatggaagggatgatcaggggcag

SEQ ID NO: 51643 - DNA, 201 bp, Homo sapiens
ggatggggagaggattagtagaacacagtttgatagttaacattttctcattcttgatatatgtattaattttggtgaggacaaattagacaattaaatgktttcaaactagaatagtggtggtggtggcataacattgtaaatgcaccaaatgccattgaattattttatttttgtttttgtgttttttttgagatggag

SEQ ID NO: 51644 - DNA, 201 bp, Homo sapiens
tgatgttgtacaagttagagttctgactaatgttgtcttgcaagagggaattgaattaggcaacatggttgtcataatttgcaccactggacatctgtgasggttggcatttcaggtgtgtggatgactctttcctaattaaccaaaactatatctcaccgactgcagccatgtgtagatatgtacaaggacatggaaggg

SEQ ID NO: 51645 - DNA, 201 bp, Homo sapiens
aggactcatgtttgtctaacctttagggatgtgacctactgtaaagtgctgtcctcagttctttgcttttccttccttcctttttttttttttttttttgkctaaccccattgagaggtgacagcgtgctggcagtcctcacagccctcgctcgctctcggcgcctcctctgcctgggctcccactttggcggcacttgag

SEQ ID NO: 51646 - DNA, 201 bp, Homo sapiens
aaactttagactttatttggatttcactagcttttccatcatgtcctttttctcttccagcatccaacattgcatttagtcatcacataccctttggtctsctctgatttgtggcaatttctcagtcttttgtttttcatgaccttgacagttttggggagtcctggtcaggtattttgtggaatgtccctccatttggat

SEQ ID NO: 51647 - DNA, 201 bp, Homo sapiens
gcactcggagcagccggccggccctgccggccccccgggcaatgaggggcttagcacccgggccagcggctatggagggtgtactgggtcccccagcagtrctagcccaccggcgctgcgcttgatttctcgccgggccttacttagctgccttccagtggggcaggactcgggacctgcagcccgccatgcctgagcctt

SEQ ID NO: 51648 - DNA, 201 bp, Homo sapiens
tgggttcaagtgtttctcgtgcctcagcctcccgagtagctgggtttacaggcacgcaccaccacacctggctaatttttttttgtgtttttcgtagagayggggtttcgccacattggccaggctggtctcgaactcccaacctcaacttatctgcctgcctcagcctcccaaagtgctgggattacagacgtgagccac

SEQ ID NO: 51649 - DNA, 201 bp, Homo sapiens
tcctggtgggtgtgggcttggcgggtcctgcactcggagcagccggccggccctgccggccccccgggcaatgaggggcttagcacccgggccagcggctrtggagggtgtactgggtcccccagcagtgctagcccaccggcgctgcgcttgatttctcgccgggccttacttagctgccttccagtggggcaggactcg

SEQ ID NO: 51650 - DNA, 201 bp, Homo sapiens
accggggctgtgcgcggcgcttgcgggccagctggagttcctggtgggtgtgggcttggcgggtcctgcactcggagcagccggccggccctgccggcccyccgggcaatgaggggcttagcacccgggccagcggctatggagggtgtactgggtcccccagcagtgctagcccaccggcgctgcgcttgatttctcgcc

SEQ ID NO: 51651 - DNA, 201 bp, Homo sapiens
ggcacatccctggggcccagcttcgacctcaggagaggcactgctgggtgggcccccggagccccctgcaggacacactggctgctcaggggagagcaatrtgtcaggccgggagctcctctcagctccttcaggccaggccccacgttcccaggcagggcaagccgcagcctcttcattttcagccttggctggggcagg

SEQ ID NO: 51652 - DNA, 201 bp, Homo sapiens
ttaccattaagaggggggcttgggcctttgctcaggataggagcacgggggggaactgcaggtggggtgaggctgggctccatacttggccctggctctgkccttgggggtacagtgggtcctgccagggctgcatagctgaaggttggagtgtcagactggaggctcttgggtgagataggagatgaaagctccttctct

SEQ ID NO: 51653 - DNA, 201 bp, Homo sapiens
tttttttttttgagagacagagtttcgctcttattgcccaggcacgatcttggctcactgcaacgtctgcctccctggttcaagcgattctcctgcctcarcctcccaagtagctgggattacaggcatgcaccaccacgcccagctaaattttgtatttttagtagagacggggtttctccatgttggtcaggctggtct

SEQ ID NO: 51654 - DNA, 201 bp, Homo sapiens
aatgatgagggatcctgaagctgcagtcaagactcccagctgcaaaactgccagctcacccctgttcacaatgatgtgactgatgtctacaagcactgackgaattatgctcaaggagcaaggggaaggcattgctgtatgatgagatctcacttatcccttctttcagactcattgtatgatgacaccactgttcttccc

SEQ ID NO: 51655 - DNA, 201 bp, Homo sapiens
gaaaatataaaattatctaactttcagcttgtgtaatggatacagtatctctaagtccggagttttagtgtactttttttttttaactgattgtttaaacracagtaaggtacaggatggttagtcaatattggtattttcacatactgattccattttccacacataccgttttaaaggagttctacacctggtttcctg

SEQ ID NO: 51656 - DNA, 201 bp, Homo sapiens
ctggcttggccttgcctggggccctgcgccctactcgcccctgaaccttttccttctcccgtagcctctctactctcccagactctgagctgagcccctcrgggtcagccatgcacacatcagggcggggaggggatgggcgggggtctggctgtgggagaggaggtgggtcatggccaggcctggggtggtgagtaccac

SEQ ID NO: 51657 - DNA, 201 bp, Homo sapiens
agcctcttcattttcagccttggctggggcagggcctggggggttagggctggtttcagttgggccattggctgcacaatcctcagagggaacctggaagrggcttggcttctccgtggctgcctctgagcactccaggtggcacggcaggatgccatcacccatgtctccaggcaggcttggagctggagctagggccaa

SEQ ID NO: 51658 - DNA, 201 bp, Homo sapiens
ccagagctgctggatgaccagcaccctgtggtccggttgctgcgcagtttttcctctgactgtacagggggccggccagtctccttggatgccacgctggygcatcacctgcaccagtgctcctaccacctgcgcctcttccggaactggctgcgctcaggccaggatgaccccgagtgcctctacggtaccccctgccac

SEQ ID NO: 51659 - DNA, 201 bp, Homo sapiens
acctcctatctgggctgcagctcaggatgttaccattaagaggggggcttgggcctttgctcaggataggagcacgggggggaactgcaggtggggtgagkctgggctccatacttggccctggctctggccttgggggtacagtgggtcctgccagggctgcatagctgaaggttggagtgtcagactggaggctcttgg

SEQ ID NO: 51660 - DNA, 201 bp, Homo sapiens
cgggttctggtggggggtcctggagccagagccagagctcgatccccagagaaggcaagggagccacagggtgccgagcggggttcagctggagagggcakctgtgggggagctggctgcaatgaggagaagccaaaggctgaagcagggaagtccagactgggtcgggcaggccccaggtgtgagtccaagggagggcta

SEQ ID NO: 51661 - DNA, 201 bp, Homo sapiens
agattggagaggagaggggccccaggagaactgggtgatgggagctggggcagtgaggaatccaggctgggggccttggtcacttccaggtattcatcatrccgggttctggtggggggtcctggagccagagccagagctcgatccccagagaaggcaagggagccacagggtgccgagcggggttcagctggagagggc

SEQ ID NO: 51662 - DNA, 201 bp, Homo sapiens
ctgagccccagaggttgagactgtaataagccaagttcatgccactgcactccagcctgggtgtcagagtgagactcaaaaaaaaaaaaaaaaaaaaaaawaattgaaaacaggtactcaaacaaatacacacagatgttcatggcaacactattcacaataatcaaagctgaggatgatggctcacacctgtaatcccag

SEQ ID NO: 51663 - DNA, 201 bp, Homo sapiens
aacgattctcctgcctcagcctcccaagtagctgggattacaggcactgcccaccacacccagctaatttttgtatttttagtagagacggggtttcgccrtgttggccaggctagtcttgaactcctggcctcaagtgattcacccgccttggcctcccaaagtgctgggattactggtgtaagccactgcgtccagcca

SEQ ID NO: 51664 - DNA, 201 bp, Homo sapiens
ggggttttgccatgttggccaggctggtttcgaactcctgatctcaagtgatgcacccacctcagcctcccaaagtgttgggattacaggcatgagccacygcgtctggcttctttttctgcttgaagcatgcctcctttgattcttttttttttttttttttttttttttttgaggtggagtcttgctctgtcatccagg

SEQ ID NO: 51665 - DNA, 201 bp, Homo sapiens
acgaggtcaggagatcgagactatcccggctaaaacggtgaaaccccgtctctactaaaaatacaaaaaaattagccaggcgtagtggcgggcgcctgtaktcccagctacttgggaggctgaggcaggagaatggcatgaacccgggaggcggagcttgcagtgagccgagatcccgccactgcactccagcctgggcga

SEQ ID NO: 51666 - DNA, 201 bp, Homo sapiens
tcagaaataggctccacatctcttaaagccttgttggttcaaaaccatgatcttctctctctctctctctctctctctttttttttttttttttttgagayggagtcttgctccgtcacccaggctggagtacagtggcgcgatctcggctcactgcaacctccacatcccaggctcaagtgattctcctacctcagcctc

SEQ ID NO: 51667 - DNA, 201 bp, Homo sapiens
ccaaaatgctgttgttgcaggcatgagccactgtgcccagccaatactcacttttaataatggacagaacaactcgtcggaatattagtaaggaagtggcmaggcgaggtggctcacacctgtaatcccagcactttgggaggctgaggcgggtggatcacaaggtcaggagattgagaccatcctggctaacatggtgaa

SEQ ID NO: 51668 - DNA, 201 bp, Homo sapiens
aaggagggtggaccacttgaggtcaggagttcaagaccagcctggccaacatggtgaaaccttgtctctactaaaaaatacacaaatcagcgaggcatggyggcaggcacctgtaatcccagctactcaggaggctgaggtaggagaattgcttgaacttgggaggtggagcttgtagtgagccaagatcgtgctactggc

SEQ ID NO: 51669 - DNA, 201 bp, Homo sapiens
aggagctagagacagtaactttcctgccctcctgccactagatcatgggagaaattgaggcacagaagcctcaattgtatccttggggcaaagtccagagsttcgaagatggtcaggctataatccttttgagttacgggctttagtcactggtgaacaggaagctgtcttgcatagacttcgttgtcccgtgtatcctta

SEQ ID NO: 51670 - DNA, 201 bp, Homo sapiens
atgctcgatctgcaggccctttaccaggggtgggtgagcgttttccccgaagatccagacgccgtgcaggggacgctggcttggccttgcctggggccctrcgccctactcgcccctgaaccttttccttctcccgtagcctctctactctcccagactctgagctgagcccctcggggtcagccatgcacacatcagggc

SEQ ID NO: 51671 - DNA, 201 bp, Homo sapiens
gtggggcccgggatgctcgatctgcaggccctttaccaggggtgggtgagcgttttccccgaagatccagacgccgtgcaggggacgctggcttggccttrcctggggccctgcgccctactcgcccctgaaccttttccttctcccgtagcctctctactctcccagactctgagctgagcccctcggggtcagccatgc

SEQ ID NO: 51672 - DNA, 201 bp, Homo sapiens
tcgaggtggggcccgggatgctcgatctgcaggccctttaccaggggtgggtgagcgttttccccgaagatccagacgccgtgcaggggacgctggcttgkccttgcctggggccctgcgccctactcgcccctgaaccttttccttctcccgtagcctctctactctcccagactctgagctgagcccctcggggtcagc

SEQ ID NO: 51673 - DNA, 201 bp, Homo sapiens
gctgcgtggtcgaggtggggcccgggatgctcgatctgcaggccctttaccaggggtgggtgagcgttttccccgaagatccagacgccgtgcaggggacrctggcttggccttgcctggggccctgcgccctactcgcccctgaaccttttccttctcccgtagcctctctactctcccagactctgagctgagcccctc

SEQ ID NO: 51674 - DNA, 201 bp, Homo sapiens
aatatccagaataagtaaatccatagagacggaaagcagattggtggtttccagggtttgggagtaggatggaatggagattgacttcttttttttttttyccccataaagtgaaagcaagtttattaagaaagtaaaggaataaaagaatggctgctccataggcagagcagccgggattgacttcttaatggatatggg

SEQ ID NO: 51675 - DNA, 201 bp, Homo sapiens
ctgaacctggaaggtcaagactgcagtgagccatgattgcaccactgtactccagcctgggcaacagagtgaaaccctgtcttgcttaaaaaaaaaaaaaacaacgcagggtgcggtggctcacacctgtaatcccaacactttgggaggccaaggcaggcagattgcttaagctcacaagttcaagaccagcctgatcag

SEQ ID NO: 51676 - DNA, 201 bp, Homo sapiens
actgtaattttagtaatattctctcatgttgttttgttttctaacagattccacctttccttgtgcgtgcctgcgtgtgtgtgtgtgtgtgtgtgtgtgtstgtgtgtgtgtgtatgccaggtgtcttatatttgagaagagtctcacattaggtccgaagacacaaataggttgaaagtaaaaggatagaaaaacatatt

SEQ ID NO: 51677 - DNA, 201 bp, Homo sapiens
gggtgcggtggtgtgcgcctgcagtcccagctacccaggaggctgaggcaggagaatcgcttgaacctgggaggcagaggttgcagggagccgagatcacrccactacactccggcctggcaacagagtgagactccatctcaaaaaaaaaaaaaaatacaaacattagctgagcatgttggtgtgtgcctgtagtcccag

SEQ ID NO: 51678 - DNA, 201 bp, Homo sapiens
gccaggtacagtggttcatgcctgtgattccagcactttgggaggctgaggcagaaggattgcttgagccaagaagttcaagaccagcctaggcaacatarggccctgtctctacaaattatatatatgtatatatatatatatatatatatattttttttttttttttttttttttttttttgagatggagtctcactct

SEQ ID NO: 51679 - DNA, 201 bp, Homo sapiens
caccagctgaaaaaagtgcagttagactcaccagcagtgggaagaaaatataaaattatctaactttcagcttgtgtaatggatacagtatctctaagtcyggagttttagtgtactttttttttttaactgattgtttaaacaacagtaaggtacaggatggttagtcaatattggtattttcacatactgattccattt

SEQ ID NO: 51680 - DNA, 201 bp, Homo sapiens
cagcccggcttggctcgccattggcagggtcattcccactgaccacatagtaggatgcacgcactcgacggaagaagtcaaggtcagcagtcttgccactscaatgattcgggatgtaggcgagatccacatatacaggggcaccagagctgcccttggaactcaaggccactgtagagacaagccaggattcattgtaga

SEQ ID NO: 51681 - DNA, 201 bp, Homo sapiens
aggttttgccatgttggccaggctggtttagagctcctgacctcaagtgatctgcctgcctcggcctcccaaagtgctgggattacaggcgtgagccaccrcacccagccaggtaaaccattttctttcctattgttctgatttacatggtttttctacattcttctgccaacttatcatttgggctataaataatgatta

SEQ ID NO: 51682 - DNA, 201 bp, Homo sapiens
gaggagtgaggtcccagaggctgtgggcagctggttccattcctgggtccagctctccagactcctgttctgcagcctcaaggcttggagagaagcgctcygccacacttgaaatcacaggcgtggtagcctcagaggaggagccctcagacagggctggtgaggcaggtcgtggcagattggagaggagaggggccccag

SEQ ID NO: 51683 - DNA, 201 bp, Homo sapiens
cctccagcagggcatccagcacagcccggcttggctcgccattggcagggtcattcccactgaccacatagtaggatgcacgcactcgacggaagaagtcwaggtcagcagtcttgccactgcaatgattcgggatgtaggcgagatccacatatacaggggcaccagagctgcccttggaactcaaggccactgtagaga

SEQ ID NO: 51684 - DNA, 201 bp, Homo sapiens
ctgggcatggtggctcacgcctgtaatcccagcactttgggaggccaaggagggtggaccacttgaggtcaggagttcaagaccagcctggccaacatggkgaaaccttgtctctactaaaaaatacacaaatcagcgaggcatggtggcaggcacctgtaatcccagctactcaggaggctgaggtaggagaattgcttg

SEQ ID NO: 51685 - DNA, 201 bp, Homo sapiens
cctttggacatggggctgtgtccatccttttcctctgctggggtgacctggcttgtggtgctgcgtggtcgaggtggggcccgggatgctcgatctgcagrccctttaccaggggtgggtgagcgttttccccgaagatccagacgccgtgcaggggacgctggcttggccttgcctggggccctgcgccctactcgcccc

SEQ ID NO: 51686 - DNA, 201 bp, Homo sapiens
cactcctgaagtctgaccagcccacacccagccctaacccacactctctgccaagtttcatgatatacttacttggtcctgccttgagtccattgactagkcctttggacatggggctgtgtccatccttttcctctgctggggtgacctggcttgtggtgctgcgtggtcgaggtggggcccgggatgctcgatctgcag

SEQ ID NO: 51687 - DNA, 201 bp, Homo sapiens
tcttatatagatttttcctggaagatatctgacttagtacctcaaaggggccactgacccctagaaaggttaagaactgccatgtagaaattccatggccrtcttccatttttgggtaaactattttctttttttttttttttctgagacagagtcttgctttgttgcccaggctggagtatagtggcacaatttcggctc

SEQ ID NO: 51688 - DNA, 201 bp, Homo sapiens
ttactgcaacctctgcctcccgggttcaaggttcaagtgattctcctgcttcagcctcccaagtagctgagattacaggcgcccaccaccacgcctggctmgtttttgtattttttgtagaaatggaatttctccatattggccaggctggtcttgaattcctgacctcaggtgatctacccgcctcggcctcccaaagtg

SEQ ID NO: 51689 - DNA, 201 bp, Homo sapiens
cttactgcaacctctgcctcccgggttcaaggttcaagtgattctcctgcttcagcctcccaagtagctgagattacaggcgcccaccaccacgcctggcyagtttttgtattttttgtagaaatggaatttctccatattggccaggctggtcttgaattcctgacctcaggtgatctacccgcctcggcctcccaaagt

SEQ ID NO: 51690 - DNA, 201 bp, Homo sapiens
aagatcttttcactattgttcctcttacacccctctccacatggctttgactgccttcaaccttttgtagctgaattacatcatccacaaagtttgccaartagctaaaatgaggggttcagaatcaaagcttttccactcaccagctgaaaaaagtgcagttagactcaccagcagtgggaagaaaatataaaattatct

SEQ ID NO: 51691 - DNA, 201 bp, Homo sapiens
gaggcaggagaatggcatgaacccgggaggtggagcttgcaataagccgagatcgcgccactgcactcaagcctggacaacagagtgatactccgtctcawaaaaaaaaaaaaaacacacagaaaattagtaaggaaatcccagcactttgggaggacaagaaaggataagcaggagtgtcgcttaagcccaggaatctga

SEQ ID NO: 51692 - DNA, 201 bp, Homo sapiens
acctactcgggaggctgaggcaggagaatggcatgaacccgggaggtggagcttgcaataagccgagatcgcgccactgcactcaagcctggacaacagaktgatactccgtctcaaaaaaaaaaaaaaaacacacagaaaattagtaaggaaatcccagcactttgggaggacaagaaaggataagcaggagtgtcgctt

SEQ ID NO: 51693 - DNA, 201 bp, Homo sapiens
tccaagggagggctaacatgtgcctcagtttctggccataatgtgggggaccccataggaatggggtgaggaggacttggggattgggcctctttttctgsctgttcccgagcccccttctccagttctgagtcactagtgctgtcatcccagtgactccggcctgattccttgggggatggggacctcctatctgggctg

SEQ ID NO: 51694 - DNA, 201 bp, Homo sapiens
ccccgtccagagctgctggatgaccagcaccctgtggtccggttgctgcgcagtttttcctctgactgtacagggggccggccagtctccttggatgccaygctggcgcatcacctgcaccagtgctcctaccacctgcgcctcttccggaactggctgcgctcaggccaggatgaccccgagtgcctctacggtaccccc

SEQ ID NO: 51695 - DNA, 201 bp, Homo sapiens
ccgttttaaaggagttctacacctggtttcctgccagtctcctgtgccaactgcctaataccattcctgtcttcagctatcttagagtgtggtccagaagkcctgccctaaaagagagcctttttagcttgactgtcttgatacacaataccatcactttttcatttttatccctactacataaatccattcacctgagaa

SEQ ID NO: 51696 - DNA, 201 bp, Homo sapiens
gaggttgctctctgagacccatcctcagtccccattcaataccagcatttgacagtgctaggagagggttctcaggcatcagatgctatcctattctaatktgtcccctcccccatcctctccctgttaactttggtttgagacacctcacaggaatggatgatggggagggacaacccctcccatttagcccagcccaag

SEQ ID NO: 51697 - DNA, 201 bp, Homo sapiens
tattctctctctttacctctttacctctgttctccatgttccttctatttcattggagagaaggttttctgcagtattaggaataattgttttttttttttgagagacagagtttcgctcttattgcccaggcacgatcttggctcactgcaacgtctgcctccctggttcaagcgattctcctgcctcagcctcccaagt

SEQ ID NO: 51698 - DNA, 201 bp, Homo sapiens
ttacttggtcctgccttgagtccattgactaggcctttggacatggggctgtgtccatccttttcctctgctggggtgacctggcttgtggtgctgcgtgrtcgaggtggggcccgggatgctcgatctgcaggccctttaccaggggtgggtgagcgttttccccgaagatccagacgccgtgcaggggacgctggcttg

SEQ ID NO: 51699 - DNA, 201 bp, Homo sapiens
aaaagtagaacccttttggcaaccttcccctctgtcccactcctgaagtctgaccagcccacacccagccctaacccacactctctgccaagtttcatgayatacttacttggtcctgccttgagtccattgactaggcctttggacatggggctgtgtccatccttttcctctgctggggtgacctggcttgtggtgctg

SEQ ID NO: 51700 - DNA, 201 bp, Homo sapiens
agtcacctccgtgtcatgagtagggatcagagtcacctagaagggagataagatatgtctgatgtgagaacataaagggaaggtaggtgagggggaagggscacctcatggtctcagaagcagctctgctgcccttagaaaaggcccatcctttaataaatagggactgtgttccactactgcctctgagtgagcgttgac

SEQ ID NO: 51701 - DNA, 201 bp, Homo sapiens
tccattgactaggcctttggacatggggctgtgtccatccttttcctctgctggggtgacctggcttgtggtgctgcgtggtcgaggtggggcccgggatrctcgatctgcaggccctttaccaggggtgggtgagcgttttccccgaagatccagacgccgtgcaggggacgctggcttggccttgcctggggccctgcg

SEQ ID NO: 51702 - DNA, 201 bp, Homo sapiens
ggcagtagtctggcagggctgctcactggcttgcttggggcgaggtcctctcctggggtggtattttcagcccgttttcatttcactctgtaggagttaasctgtggctcagcttctccctttttccttcctccatctcattttccccaagtcctctggcctggcttccacctcccagatcctctgtccaagagcgggttt

SEQ ID NO: 51703 - DNA, 201 bp, Homo sapiens
gtcattattgataccatagtgctttaatatatcgttataatattatcaacaaaaatgatgtttaccaagggaaaagtaggttagtcaagtactagagggcratgaagcagtagaggatggagtaggaatcatcccacagtgtaattgaagactctgaggtctttattacactactgtcaggatgtaggaaatcagttttta

SEQ ID NO: 51704 - DNA, 201 bp, Homo sapiens
agtccaagggagggctaacatgtgcctcagtttctggccataatgtgggggaccccataggaatggggtgaggaggacttggggattgggcctctttttckggctgttcccgagcccccttctccagttctgagtcactagtgctgtcatcccagtgactccggcctgattccttgggggatggggacctcctatctgggc

SEQ ID NO: 51705 - DNA, 201 bp, Homo sapiens
gaacagtggagccacacagagttgttagagtgactatagagaggaggagctactggtggtaattggaggtgggaatatgggccagaggcactggtgaagtrtcatcctgcctccggggaataactgaaatcaaatatgcctttcattattttatttggataggaccgaagtaaagattcttacttcattcagcattggact

SEQ ID NO: 51706 - DNA, 201 bp, Homo sapiens
ttaagtgatcctcctgcctcggccaaaatgctgttgttgcaggcatgagccactgtgcccagccaatactcacttttaataatggacagaacaactcgtcrgaatattagtaaggaagtggccaggcgaggtggctcacacctgtaatcccagcactttgggaggctgaggcgggtggatcacaaggtcaggagattgaga

SEQ ID NO: 51707 - DNA, 201 bp, Homo sapiens
gcatctgttaaaactaatgaggaagctctatatgatctaatatgaaataatcaccaggatatattattaagtgaaaaaaacaagatgtagaatagtgttartagtatgttacctatattgtaagtagagaggggaaataaagaaaaaatacatatatatttacaaaaaatacttgctagaagtataaaccagaaacaaaat

SEQ ID NO: 51708 - DNA, 201 bp, Homo sapiens
cagtctccttggatgccacgctggcgcatcacctgcaccagtgctcctaccacctgcgcctcttccggaactggctgcgctcaggccaggatgaccccgartgcctctacggtaccccctgccaccaaactggctgctgccactaccctggctgggtctgactgctttgcttattgcacttctggcaggagagcccaccta

SEQ ID NO: 51709 - DNA, 201 bp, Homo sapiens
accaattaaagggaaataaacattctgccttttcagtgagaactgtagttcagtataatcaaatagtcccatttgcagaaggaaagctcttctttacagaraatatgccagttgatggtggagaactagacattcctcaaaggatcacccctaatcagaaggggaaagcttcacaatgagatcttgttggtgccaccttaa

SEQ ID NO: 51710 - DNA, 201 bp, Homo sapiens
caaactggctgctgccactaccctggctgggtctgactgctttgcttattgcacttctggcaggagagcccacctatttctttctcctatttgccctaagkttatgtaacttgcatttagtcacttggatgggattggggccagactgcctggtagctgtagcattggctgctcatccccttcctattctcctttctcacc

SEQ ID NO: 51711 - DNA, 201 bp, Homo sapiens
acccgggaggtggagcttgcaataagccgagatcgcgccactgcactcaagcctggacaacagagtgatactccgtctcaaaaaaaaaaaaaaaacacacmgaaaattagtaaggaaatcccagcactttgggaggacaagaaaggataagcaggagtgtcgcttaagcccaggaatctgagaccagtctgggtaacatag

SEQ ID NO: 51712 - DNA, 201 bp, Homo sapiens
gtaatattctctcatgttgttttgttttctaacagattccacctttccttgtgcgtgcctgcgtgtgtgtgtgtgtgtgtgtgtgtgtctgtgtgtgtgtgtatgccaggtgtcttatatttgagaagagtctcacattaggtccgaagacacaaataggttgaaagtaaaaggatagaaaaacatattctgtgcaaatag

SEQ ID NO: 51713 - DNA, 201 bp, Homo sapiens
catggtgaaaccttgtctctactaaaaaatacacaaatcagcgaggcatggtggcaggcacctgtaatcccagctactcaggaggctgaggtaggagaatygcttgaacttgggaggtggagcttgtagtgagccaagatcgtgctactggcctccagcgtagatggcaagagagaaactccatctgaaaaaaaaaaatta

SEQ ID NO: 51714 - DNA, 201 bp, Homo sapiens
cagggcagaaaagtggctgtgcagagagcattccttaaaaacattgtaaggcaaatgaacaacctgtgcctggcctcagaatgcattttttttttttttttgagatggagtttcattctgtcacccaggctggagtgccaccatgcccggctaatttttgaatttttagtagagacaggatttcgccatgttggccaggct

SEQ ID NO: 51715 - DNA, 201 bp, Homo sapiens
gaggctgcagtgaactgtgctagcatcactgcattccagccactgacagagtaagagcctgtctctaaaacacacacacacacacacacacacacacacamacacacacacacacacactgaatatatataataaaaatccacaagctcataatgaatgaaaacaagagctgggtgctaggtgaggtagctcatgcacctg

SEQ ID NO: 51716 - DNA, 201 bp, Homo sapiens
aggggaaataaagaaaaaatacatatatatttacaaaaaatacttgctagaagtataaaccagaaacaaaatttattacctcagatttaacaatagggaawggggctgaagggcatgaaggaaatgcagtttctctgagtgtgcctttttgtatagctttgacttgtgagcctgtaaatgtttttcaaaatataaagttaa

SEQ ID NO: 51717 - DNA, 201 bp, Homo sapiens
gaggggaaataaagaaaaaatacatatatatttacaaaaaatacttgctagaagtataaaccagaaacaaaatttattacctcagatttaacaatagggawtggggctgaagggcatgaaggaaatgcagtttctctgagtgtgcctttttgtatagctttgacttgtgagcctgtaaatgtttttcaaaatataaagtta

SEQ ID NO: 51718 - DNA, 201 bp, Homo sapiens
ttgaggagatgggggatgggaaatggaggaaagggtgcagctctgggcacctcactgacggtatcctgccccaggtcacataaattactattggaaatccytcccaggatgccaaataaatagattgagataaagaggtccctggagttggggatataatctccctctacgagggaggaggttgctctctgagacccatcc

SEQ ID NO: 51719 - DNA, 201 bp, Homo sapiens
gatctcctgacctcgtgatctgcccacctctgcctcccaaagtgctgtaattacaggcgtgagccaccacgcccggccccaataatccacttttaagaatmtattctgaagccatttctatgcaaagttgaaataacatttgcttatttatgtgtttttttagagacagggtcttgctctgtcacctaggctggagtactg

SEQ ID NO: 51720 - DNA, 201 bp, Homo sapiens
tccttcagctttttacccctttagcccaagaggctgtccagggtagctgatcctggttatttggtcctcaactcttgaccccacggaatgcatatcccctycccaggaggccttctgcccctcttccctcccccagaccagatgtatgtatccaccctaggctcctattcttcatactcaggcacaagtgtttccagtaat

SEQ ID NO: 51721 - DNA, 201 bp, Homo sapiens
acctcaggtgacccgcctgcctcagaggaataatttctaatttggagagaagttcttcctcaaagcgctctttggggaagaaagaatggagacttcattcycctttcatccctatttgatctctacagttttctccagtaaagatgactagcagacaacctagatatttagaaaagctgggagcaggaggccgggcatgat

SEQ ID NO: 51722 - DNA, 201 bp, Homo sapiens; identical to SEQ ID NO: 9043

SEQ ID NO: 51723 - DNA, 201 bp, Homo sapiens
agcacatgggatcacctcttaaagtattcttaacaaaattatttaacataaatcagttaagttagatcaatttccagttaataggaaatacaagggatagkgaaataagttaaatgattctatgtggaaacaattagacaagtccagaatgtgggacatgaccttctgcaaagacaactggcctgttcttttctcttttct

SEQ ID NO: 51724 - DNA, 201 bp, Homo sapiens
ggtatatgggcattgactgcagcagtctttcaactactttttaaaaatatatgtttgaaaatgttcataatataacgtttaaaaaattgaaaatggtttgrttgaagggtccccaggaaatgctacttctcagccaaggaagggtaagttggctttgacttatgttgagaacgtgtggctcctggattcttcctcatatgt

SEQ ID NO: 51725 - DNA, 201 bp, Homo sapiens
ggctgatgttggaggattgcttgagcccaggagtttgaggctgcagtgaactgtgctagcatcactgcattccagccactgacagagtaagagcctgtctytaaaacacacacacacacacacacacacacacacacacacacacacacacacactgaatatatataataaaaatccacaagctcataatgaatgaaaaca

SEQ ID NO: 51726 - DNA, 201 bp, Homo sapiens
tgcctcagcctcctgagtagctgtagctgggattacaggcatgcgccaccatgcctggctaatttttttttgtatttttagtagaggaggagtttcactaygttggtcaggctggtctcgaactcctgaccttgtgatctgcccacctcggcctcccaaagtgctgggattacaagtatgagccaccgtgtccagcccctc

SEQ ID NO: 51727 - DNA, 201 bp, Homo sapiens
ggatgttgaaacgggaggatcacttgaacccaggagttcaaggctgcagtgagctatgatcacgccactgcgctccagcctgggtggacagagcaagatgytaccacaaaagagagagagagagagagagaaagagaagagagagagaaaaaaccctgaaaagaagagcagtgagcaaatactagccctaccacattttaa

SEQ ID NO: 51728 - DNA, 201 bp, Homo sapiens
aaagttgaaataacatttgcttatttatgtgtttttttagagacagggtcttgctctgtcacctaggctggagtactgtggtatgatcatgcctggagaayagtggcatgatcactgaaggctggaatcctgtgttcaagtgatcctcctgcctcagcctcccaaatagctgggactacaggcatgtgccaccatgcccag

SEQ ID NO: 51729 - DNA, 201 bp, Homo sapiens
ataatttttaattttgtttagcttgttaatggtgtttggctatgttggaaaaatttctttatatatatcttttctcttctcttttttttttttttttttttgagacagagtctctctctgtcgcccatggtagagtgcagtggcacaatctctgctcactgtgcaacctctgcctcctgggttcaagtgattctcatgcct

SEQ ID NO: 51730 - DNA, 201 bp, Homo sapiens
tttttcttttttgagatggagtcttgctttgttgcccaggctggagtgtagtggcatgatcttggcttactgcaacctctgcctcccgggttcaaggttcmagtgattctcctgcttcagcctcccaagtagctgagattacaggcgcccaccaccacgcctggctagtttttgtattttttgtagaaatggaatttctcc

SEQ ID NO: 51731 - DNA, 201 bp, Homo sapiens
attggctgcacaatcctcagagggaacctggaaggggcttggcttctccgtggctgcctctgagcactccaggtggcacggcaggatgccatcacccatgwctccaggcaggcttggagctggagctagggccaagtccagtgaagctgggggtgctgggctcagaggagtgaggtcccagaggctgtgggcagctggttc

SEQ ID NO: 51732 - DNA, 201 bp, Homo sapiens; identical to SEQ ID NO: 9054

SEQ ID NO: 51733 - DNA, 201 bp, Homo sapiens
ggcggtgggtgactcatctgttgtaacggcccagggtgtggtcgtgggggtggggggcggcggctgggaggccggacctgcaggaccggaggtggactgcygcctccccccgcgccctgtgcctcctggggctacctgaagccggtgtcctgggagatctgtgagcagttggtatctgtggggcagagagaaacggggtga

SEQ ID NO: 51734 - DNA, 201 bp, Homo sapiens
tggaggccacctgcattgcttggttcatggccctgtgtgactctgacttctacttccattttgttgttgttgttgttacttctcccactctgactcacctmtctcccactttcagttagtaaggcccttgtgattacactgggctcatttagatgatgcaggataatctccccatttcgagatcttaatcacatctacgaa

SEQ ID NO: 51735 - DNA, 201 bp, Homo sapiens
ggctggtctcaaactcctgacctcaggtgatccacccaactcggcctctcaaagtgctgggattacaggtgtgagccaccacgcaggccagaagccacaakaatttaggaaacctgtgacatttgcctttggagaaatgcaaatagggctttttgggaagactactgcctccctctcaatgctctggatgaattcctggat

SEQ ID NO: 51736 - DNA, 201 bp, Homo sapiens
tccctaggaaataacttatctcagtagcagctggccctttacaaagcactttcagaaaattcctcatctcacttaatcctcacaacaccctctgggatggsaaatgactgtccctttggacagatgaggaggtggcttcagagagcttatggctctcgagggcagagctggcaccagcccttgagccaacagcaaagcctg

SEQ ID NO: 51737 - DNA, 201 bp, Homo sapiens
ctaggaggagaaagccacaacactgtgcctgagggaaacaggtttgtatccagagcttttgttctctccccttttgttcccctgcttctctgaggctcccycttccaaaaagcacccactaggggcgaggcccaatgccaattcttcatagccatggctgtcagcctcatccccacaccacgcttagccttgccacaccac

SEQ ID NO: 51738 - DNA, 201 bp, Homo sapiens
ttgttgcataggtatacgtgtgccctggtggtttgctccacctatcaacccatcacctaggttttaagccccgcatacattaactgtttgtcctgatgctyaccctcccctcgccacaccccttccccgaccacagaccctggtatgtcttgttcccctctctgtctacgtgttctcattgttcaacgcgctacagaggtg

SEQ ID NO: 51739 - DNA, 201 bp, Homo sapiens
ctggaatctcaggttcaagggaggactctatcatgtgtgcagaactccaccccgggggactctattcaactgaagcctgaaaggatggggggctctttctycacccctgaactgtgctgtcctccaccctcagagacaaaagaaccccagccagcctcctcgcgctgaggtctccccctctgatccctccaggatttagga

SEQ ID NO: 51740 - DNA, 201 bp, Homo sapiens
gggtagatccaaccagtttcctaagctgttccacattcctcctcctctccccaaatcattctctttcccagggctataaagagcagggttgcatttggtarcagttctggtcctcatccttggggctcaccgtgggggaaatggtgtatatccctgcaggcagaattcctgaattccccactccccaggctgcaaggtgtt

SEQ ID NO: 51741 - DNA, 201 bp, Homo sapiens
cttaggacccatctattcccagtcaggccctgcctcccaggctcctctgctctagactgtgccttgcccccttgggccatctgtactggaagggcctagcragcttcacatctgagctcttcactcagtgaacctcagggcttcttctcattgtcctgcccgcctcttgcaggtgtgaagactccagaggagggctgcctc

SEQ ID NO: 51742 - DNA, 201 bp, Homo sapiens
attccatcccttctccctccagaattttcagctgtgggttctctagctcagaacactttcccttcccaggggatttcttctcctgaacaactacttcctgmgtcctcttcttcaccccaacacgggtcatttcctatcttcccccacacgctgtccatccccactatagctgtctcctggaataatctcttgcacctggct

SEQ ID NO: 51743 - DNA, 201 bp, Homo sapiens
tcacagcctgctcaccacaacgtctgtgttgacagggtgtttctgcccggagcccccacccagcctccaacactgtttggtacacagaagccatggcaacrgcccccacctcatcccctcctcccacgcaagctttggagcttcctgtttgtgtagcctcagctttctcttctgctcctgactctcggtggtgaggggctg

SEQ ID NO: 51744 - DNA, 201 bp, Homo sapiens
cctacgcttttcccagccggatggggttgggcgcctggtgttgggtgagagagtctccgcctagagggccttgatttttgcctgtgtcacctactattctyatgcccttccagatccacctcttatcttctctccgaccgggaagtcagctgcaccgtaagtgcctccacctccttggctttcttctgcctttccattgta

SEQ ID NO: 51745 - DNA, 201 bp, Homo sapiens
caggcctggcctggttggaactgccccttctcaggaccccgccctatggctctggcacctcagagcttgagggcaatggccccagagtggagcagatacastgcagctggaggccgtgaccctgccagctgtgtccaggccccagcgttgggcggtggagggggttcctcagcatccactttccacccagtggtgggtctg

SEQ ID NO: 51746 - DNA, 201 bp, Homo sapiens
tctggttctgagggtggtgcacgctgagctgcgataggtaggcatattctcacctttccacccctgctgtcctcatccaggtgctatgtgagctcattaaygcactgtaccccgaggggcaggccccagtaaagaagatccaggcctccaccatggccttcaagcagatggagcagatctctcagttcctgcaagcagctg

SEQ ID NO: 51747 - DNA, 201 bp, Homo sapiens
ttttgttggttttgctcatgtagagtagtggttggcatgttgtaggtgctggataaatatttgttgaatgaatgagtgagcatgacaccaccctcatgctsctcagccccctggcttggcaacacagtgcccagccagcccaagggcctagcaacccagcctttcatcatatctgagatacagcccagctcatgtctctgc

SEQ ID NO: 51748 - DNA, 201 bp, Homo sapiens
ggtatggaatgtatgtgctgaccccctaggtgagtctggggattggaacagggatcttaggtctgcctctctctctctctctctctctctctctctctctstgtgtgtgtgtgtgtgtgtgaagttttttacaggtgaataaacaaagtttgaaagatgtttctgtgtgttatctgtctttgagagagtgccaggaaaatc

SEQ ID NO: 51749 - DNA, 201 bp, Homo sapiens
cccatgatggccaatggaaaggagagttggggaagggaggcagagaggaggaggaagagggggagaaggaagaaggtttcagatgctccacccagtttggytcacctgtgggtaacaagcgtagctctctgcagcctattcatatgcgtgtgagtgtgcatccaggtgtgtgagaattctcagggctagggctgggggcca

SEQ ID NO: 51750 - DNA, 201 bp, Homo sapiens
gcactgctctaagccctataggtggactgtttagttctctacaattctatgaattaggtagtactattagctctgttctatagaccagggaactcaagcayagaatgcacaacagtcacacagcaggtaaagggtagagcaggtggggagccagtcaaggaagggaaactgtcctaggcagaggaatagcctttgtaaagg

SEQ ID NO: 51751 - DNA, 201 bp, Homo sapiens
ctcctcagccccctggcttggcaacacagtgcccagccagcccaagggcctagcaacccagcctttcatcatatctgagatacagcccagctcatgtctcygcttccaatgcttccagattattcatttccaaaaaataaaaacccaagaagctgcatttcctacagatagaggagaggaggttggagggtggattgcatg

SEQ ID NO: 51752 - DNA, 201 bp, Homo sapiens
caagggtccggtgactactttaccccgccccgtgctgtcaggtcctgtccccaagccctgacccgacattgttggacgatgaggtcaggcgaggttagcccatgcatagacagggcgtccgtctggagcagggactcagggactgagccccacccgcgggctccatcgctgagtcctcactggggcgaggggaaaaaaggg

SEQ ID NO: 51753 - DNA, 201 bp, Homo sapiens
aagggtccggtgactactttaccccgccccgtgctgtcaggtcctgtccccaagccctgacccgacattgttggacgatgaggtcaggcgaggttagcccatgcatagacagggcgtccgtctggagcagggactcagggactgagccccacccgcgggctccatcgctgagtcctcactggggcgaggggaaaaaagggc

SEQ ID NO: 51754 - DNA, 201 bp, Homo sapiens
caacttgcttactgttttctttatgtttgagggaaggcaggggcaggtcccctgggtgtccctagggtgggccttcccagctccagcagccgcagcccatsagcttctgcctgcccgtgggggtggggaagagaaacagctgctgaccaggcctggcctggttggaactgccccttctcaggaccccgccctatggctctg

SEQ ID NO: 51755 - DNA, 201 bp, Homo sapiens
cctggtaggcaacttgcttactgttttctttatgtttgagggaaggcaggggcaggtcccctgggtgtccctagggtgggccttcccagctccagcagccrcagcccatcagcttctgcctgcccgtgggggtggggaagagaaacagctgctgaccaggcctggcctggttggaactgccccttctcaggaccccgccct

SEQ ID NO: 51756 - DNA, 201 bp, Homo sapiens
agggtccggtgactactttaccccgccccgtgctgtcaggtcctgtccccaagccctgacccgacattgttggacgatgaggtcaggcgaggttagcccatgcatagacagggcgtccgtctggagcagggactcagggactgagccccacccgcgggctccatcgctgagtcctcactggggcgaggggaaaaaagggcg

SEQ ID NO: 51757 - DNA, 201 bp, Homo sapiens
gggtccggtgactactttaccccgccccgtgctgtcaggtcctgtccccaagccctgacccgacattgttggacgatgaggtcaggcgaggttagcccatgcatagacagggcgtccgtctggagcagggactcagggactgagccccacccgcgggctccatcgctgagtcctcactggggcgaggggaaaaaagggcgt

SEQ ID NO: 51758 - DNA, 201 bp, Homo sapiens
ccggtgactactttaccccgccccgtgctgtcaggtcctgtccccaagccctgacccgacattgttggacgatgaggtcaggcgaggttagcccatgcatagacagggcgtccgtctggagcagggactcagggactgagccccacccgcgggctccatcgctgagtcctcactggggcgaggggaaaaaagggcgtcgga

SEQ ID NO: 51759 - DNA, 201 bp, Homo sapiens
accttgccagcctctaaactaggaggcttcttcctacataaacacgcccacagtgtttagctaactttctaggcagaaagtttcctactggggcacaagtytacgggctctcggtggaggctgaggtactcacgggtggagaccactgcagccgcctttgtagattcagactccccgaacctttaacccttgctctggtct

SEQ ID NO: 51760 - DNA, 201 bp, Homo sapiens
aaaaacccaagaagctgcatttcctacagatagaggagaggaggttggagggtggattgcatgctctggacacatggaaggtgatttgaggatttgggggaaaaaaatgggaggagggcaggaggaagaggtaggagccagcttgggttcatttgctccttgccttcagcctggaagtggaaaatcactgtggaggtggag

SEQ ID NO: 51761 - DNA, 201 bp, Homo sapiens; identical to SEQ ID NO: 9068

SEQ ID NO: 51762 - DNA, 201 bp, Homo sapiens; identical to SEQ ID NO: 9069

SEQ ID NO: 51763 - DNA, 201 bp, Homo sapiens
cccaagacacagcctctgcggccgagaggtgttgagggtttgaggcaggctggtccccttgtatttcgcagagccccaaggtccattgagagggggtgacrggattgtttaacctgggtgtgtgggagagggggagctggagtgacttcatccctgaaggccaacctggcctggagccagatgtggttagaaggggtggct

SEQ ID NO: 51764 - DNA, 201 bp, Homo sapiens
taagaaggggtgtgcagtggccccagcctgaggccgttccagtatggcctgtgccttccctccacccctccaccttgttggtcctttcctcgcttgttctycctagctctgctctgttgttcaccaaacctctcaaggcctgacgctggctcctgggagggggacctgcccctaccacagaccctgatctcctgtccttcc

SEQ ID NO: 51765 - DNA, 201 bp, Homo sapiens
ttccctggcaggggccctcgtggcttctcattttccattcccttcactgtggctaaggggtggggtgaggggatggagagggagggctgcctaccatggtytggggcttgaggaagatgagtttgttgatttaaataaagaatttgtcatttttgaatggactctggctgtgtctggggccactgtgccactgtggggaag

SEQ ID NO: 51766 - DNA, 201 bp, Homo sapiens
ggggcccagactaggcaccagcctgtgtatggttctgccttttcttgccatctcccaacaccttattctgtgtggctgtctacagtggtgtctctctctctttttttcttacatttttctttattattattattattaattattatactttaagttctagggtacatgtgcataacgtgcaggtttgttacataggtatac

SEQ ID NO: 51767 - DNA, 201 bp, Homo sapiens
gggcccagactaggcaccagcctgtgtatggttctgccttttcttgccatctcccaacaccttattctgtgtggctgtctacagtggtgtctctctctctttttttcttacatttttctttattattattattattaattattatactttaagttctagggtacatgtgcataacgtgcaggtttgttacataggtataca

SEQ ID NO: 51768 - DNA, 201 bp, Homo sapiens
ggcccagactaggcaccagcctgtgtatggttctgccttttcttgccatctcccaacaccttattctgtgtggctgtctacagtggtgtctctctctctttttttcttacatttttctttattattattattattaattattatactttaagttctagggtacatgtgcataacgtgcaggtttgttacataggtatacat

SEQ ID NO: 51769 - DNA, 201 bp, Homo sapiens
accatggtctggggcttgaggaagatgagtttgttgatttaaataaagaatttgtcatttttgaatggactctggctgtgtctggggccactgtgccactrtggggaagggaggaatactgggcaaagtgcagtgagtgatacaggaaggagggcagagatgagaggttgcagtgctaacccctgtcttgagtttcctccc

SEQ ID NO: 51770 - DNA, 201 bp, Homo sapiens
gcccagactaggcaccagcctgtgtatggttctgccttttcttgccatctcccaacaccttattctgtgtggctgtctacagtggtgtctctctctctttttttcttacatttttctttattattattattattaattattatactttaagttctagggtacatgtgcataacgtgcaggtttgttacataggtatacatg

SEQ ID NO: 51771 - DNA, 201 bp, Homo sapiens
ggcaggacctgaatttttttttttctttttcttgagatggagtcttgctctgttgcccaggctggagttcagtggtatgatctcggctcactgcaacctcygcctcccaggttcaagcaattctccctgcctcagcctcttgagtagctgggagtacagatgcctgccaccacacctggctaatttttgtatttttagcag

SEQ ID NO: 51772 - DNA, 201 bp, Homo sapiens
cgagaactatgagtgggactcagaattccctggggacatggaattgctggagactttgcacctgggcttggccagctcccggctcagacctgaagctgagmcagagctaggtgtgtgagccccccggaaaggcaggcatctcggccatactgtcccacatccccccgccaccttaggacccatctattcccagtcaggccc

SEQ ID NO: 51773 - DNA, 201 bp, Homo sapiens; identical to SEQ ID NO: 9061

SEQ ID NO: 51774 - DNA, 201 bp, Homo sapiens; identical to SEQ ID NO: 9062

SEQ ID NO: 51775 - DNA, 201 bp, Homo sapiens
attgttggacgatgaggtcaggcgaggttagcccatgcatagacagggcgtccgtctggagcagggactcagggactgagccccacccgcgggctccatckctgagtcctcactggggcgaggggaaaaaagggcgtcggactttagctggctggccccgagtgaccccgggtcgtggcgccggccctgggccagctcgtg

SEQ ID NO: 51776 - DNA, 201 bp, Homo sapiens
tttgtgtatggaccctgggctgagagggagctgatgcccagcagtttcatgcccttcaccactgtcctgttgaacacgggccaagatgctttcagtggccytatcccctttacctggaacagcttattttcaagggagacaccagctgtatttgagaggggctcagccattgggctcaccttcttctggctgcacccacca

SEQ ID NO: 51777 - DNA, 201 bp, Homo sapiens
gtggccttatcccctttacctggaacagcttattttcaagggagacaccagctgtatttgagaggggctcagccattgggctcaccttcttctggctgcacccaccaccacccaagccttgtgaggaatctcaatgttcccttaattcatctaactgcagactcagctgcttccttctggagccggcctccagtggcatct

SEQ ID NO: 51778 - DNA, 201 bp, Homo sapiens
agagtctccgcctagagggccttgatttttgcctgtgtcacctactattctcatgcccttccagatccacctcttatcttctctccgaccgggaagtcagytgcaccgtaagtgcctccacctccttggctttcttctgcctttccattgtacgtgccagtatcttctgcttccttttttgcatctttaccagggggatgt

SEQ ID NO: 51779 - DNA, 201 bp, Homo sapiens
tctccgcctagagggccttgatttttgcctgtgtcacctactattctcatgcccttccagatccacctcttatcttctctccgaccgggaagtcagctgcmccgtaagtgcctccacctccttggctttcttctgcctttccattgtacgtgccagtatcttctgcttccttttttgcatctttaccagggggatgttggg

SEQ ID NO: 51780 - DNA, 201 bp, Homo sapiens
ccttgatttttgcctgtgtcacctactattctcatgcccttccagatccacctcttatcttctctccgaccgggaagtcagctgcaccgtaagtgcctccmcctccttggctttcttctgcctttccattgtacgtgccagtatcttctgcttccttttttgcatctttaccagggggatgttgggtgttggggaggaaca

SEQ ID NO: 51781 - DNA, 201 bp, Homo sapiens
gcccttccagatccacctcttatcttctctccgaccgggaagtcagctgcaccgtaagtgcctccacctccttggctttcttctgcctttccattgtacgkgccagtatcttctgcttccttttttgcatctttaccagggggatgttgggtgttggggaggaacaaaagtgggagagggtaagaaggggtgtgcagtggc

SEQ ID NO: 51782 - DNA, 201 bp, Homo sapiens
tgcctccacctccttggctttcttctgcctttccattgtacgtgccagtatcttctgcttccttttttgcatctttaccagggggatgttgggtgttgggraggaacaaaagtgggagagggtaagaaggggtgtgcagtggccccagcctgaggccgttccagtatggcctgtgccttccctccacccctccaccttgtt

SEQ ID NO: 51783 - DNA, 201 bp, Homo sapiens
acgggggtcggggacatgtgcgtgctgtgtagaaagcaagaagccagcgctttgaacttgctccagcgagctcggggatcaagggctggtaccaggcaagrgtccggtgactactttaccccgccccgtgctgtcaggtcctgtccccaagccctgacccgacattgttggacgatgaggtcaggcgaggttagcccatgc

SEQ ID NO: 51784 - DNA, 201 bp, Homo sapiens
ggacccctgcctaggtctggaggtctacccttcgcgcacgcagctgccgggcctcctgcctcagcccgtgctggccggcgtggtgggcggagtctgctttytgggagtggccgtccttgtgagcatcctggccggctgcctcctgaaccggcgcagggctgcccgccgccgccgcaagcgcctccgccaaggtaagtccct

SEQ ID NO: 51785 - DNA, 201 bp, Homo sapiens
ggcctcctgcctcagcccgtgctggccggcgtggtgggcggagtctgctttctgggagtggccgtccttgtgagcatcctggccggctgcctcctgaaccsgcgcagggctgcccgccgccgccgcaagcgcctccgccaaggtaagtccctccaccctcagccctgctactgcgcacttgggcctagcctccttaagccc

SEQ ID NO: 51786 - DNA, 201 bp, Homo sapiens
tggggcgaggggaaaaaagggcgtcggactttagctggctggccccgagtgaccccgggtcgtggcgccggccctgggccagctcgtgctcctgggctttyccgcgcgacccttcacttcctggttccaggagcacgtgtgagcactgcgtgccctctgagtccccgaggccgcccttttcattcctgttcctgctagctt

SEQ ID NO: 51787 - DNA, 201 bp, Homo sapiens
gacatgtgcgtgctgtgtagaaagcaagaagccagcgctttgaacttgctccagcgagctcggggatcaagggctggtaccaggcaagggtccggtgactrctttaccccgccccgtgctgtcaggtcctgtccccaagccctgacccgacattgttggacgatgaggtcaggcgaggttagcccatgcatagacagggcg

SEQ ID NO: 51788 - DNA, 201 bp, Homo sapiens; identical to SEQ ID NO: 9063

SEQ ID NO: 51789 - DNA, 201 bp, Homo sapiens
ccttgcccccttgggccatctgtactggaagggcctagcgagcttcacatctgagctcttcactcagtgaacctcagggcttcttctcattgtcctgcccrcctcttgcaggtgtgaagactccagaggagggctgcctcctgaacactgcccatgttactggccctgaggcccgctgtgctgcccttcgggaggaattcc

SEQ ID NO: 51790 - DNA, 201 bp, Homo sapiens
gccccgggtccgccccgtctgaggcgggaccctcctgaaaatccccggctgggcagggcgcaccacttgcagctgcagcccttgccttgagtcagtgcgcygctctccagcccgcttgaacggtgagcaggtcgggggtacgggggtcggggacatgtgcgtgctgtgtagaaagcaagaagccagcgctttgaacttgct

SEQ ID NO: 51791 - DNA, 201 bp, Homo sapiens; identical to SEQ ID NO: 9065

SEQ ID NO: 51792 - DNA, 201 bp, Homo sapiens
gccttgcccccttgggccatctgtactggaagggcctagcgagcttcacatctgagctcttcactcagtgaacctcagggcttcttctcattgtcctgccygcctcttgcaggtgtgaagactccagaggagggctgcctcctgaacactgcccatgttactggccctgaggcccgctgtgctgcccttcgggaggaattc

SEQ ID NO: 51793 - DNA, 201 bp, Homo sapiens
caagaaggactgtgaggcttactctagtgaaagagtccaagctgtcttcaggcaagacaggagcctctctggttcattgtctctggttctgagggtggtgyacgctgagctgcgataggtaggcatattctcacctttccacccctgctgtcctcatccaggtgctatgtgagctcattaatgcactgtaccccgaggggc

SEQ ID NO: 51794 - DNA, 201 bp, Homo sapiens
gactgacatttatctggcccagctttcgggctgggggaagtggagggggcgggttgctcttaatgaggtttaaaaataactgatttaggggaggatctgcyggaaatgtgcagcttgataagctggggtaaaaaggagcagccatgttggagtcgggacgggagggactggcccaagacacagcctctgcggccgagaggt

SEQ ID NO: 51795 - DNA, 201 bp, Homo sapiens
gtgagagtggggatggagtgtgggattcgatgtagaagacctgcggctgggacggggctcccccagtgttctcattgacttcaaagcaccagacagcaatrgctctctatctctagccccctcccagtttctcctccccactacaaggggcagacctacaactgcagaggaggccaaggcagggcgggcccagtagggccc

SEQ ID NO: 51796 - DNA, 201 bp, Homo sapiens
ggggatgttgggtgttggggaggaacaaaagtgggagagggtaagaaggggtgtgcagtggccccagcctgaggccgttccagtatggcctgtgccttccytccacccctccaccttgttggtcctttcctcgcttgttcttcctagctctgctctgttgttcaccaaacctctcaaggcctgacgctggctcctgggagg

SEQ ID NO: 51797 - DNA, 201 bp, Homo sapiens
tgggtgttggggaggaacaaaagtgggagagggtaagaaggggtgtgcagtggccccagcctgaggccgttccagtatggcctgtgccttccctccacccytccaccttgttggtcctttcctcgcttgttcttcctagctctgctctgttgttcaccaaacctctcaaggcctgacgctggctcctgggagggggacctg

SEQ ID NO: 51798 - DNA, 201 bp, Homo sapiens
ccatcagcttctgcctgcccgtgggggtggggaagagaaacagctgctgaccaggcctggcctggttggaactgccccttctcaggaccccgccctatggytctggcacctcagagcttgagggcaatggccccagagtggagcagatacactgcagctggaggccgtgaccctgccagctgtgtccaggccccagcgttg

SEQ ID NO: 51799 - DNA, 201 bp, Homo sapiens
ccagcctgaggccgttccagtatggcctgtgccttccctccacccctccaccttgttggtcctttcctcgcttgttcttcctagctctgctctgttgttcmccaaacctctcaaggcctgacgctggctcctgggagggggacctgcccctaccacagaccctgatctcctgtccttccccagctctgctctgggctcagg

SEQ ID NO: 51800 - DNA, 201 bp, Homo sapiens
ttaccgtatgataagttccgtgataaagctatgtgttggttattgtagcacaaaggaagatgttgcattcaaggccacctttagtgaacgctaatatcgtrtgctgggacaaatgccacatattgggggggagtcctcaggaccctcacagatagatggtggtaataatagtattcactatgtgccaggcactgctctaag

SEQ ID NO: 51801 - DNA, 201 bp, Homo sapiens; identical to SEQ ID NO: 9054

SEQ ID NO: 51802 - DNA, 201 bp, Homo sapiens; identical to SEQ ID NO: 51733

SEQ ID NO: 51803 - DNA, 201 bp, Homo sapiens
ctaatggtggggtttcttctgggctccagtattggccaactctgcatgttgccttgtacttttcatttagatctggtggttctccggagagcagcttcctygggtgttacatgagccaagccctcactgtacagaagagtgagagctgaaacctgttccctgagctgatcagaaggacatcccttggcccctccatctggg

SEQ ID NO: 51804 - DNA, 201 bp, Homo sapiens
ttctgtaactgctttttctacatctcatcatgaaacctcccagacttcatcctgatctgtagtctcccctcttggccctgccttggtcctggctctactayctgctcactcctctgccctctcccccttcctcatcgtcttaaatgctagttcaggggttcaagtcttctagggagtgggctgatggggcagcagggtagg

SEQ ID NO: 51805 - DNA, 201 bp, Homo sapiens; identical to SEQ ID NO: 51734

SEQ ID NO: 51806 - DNA, 201 bp, Homo sapiens
ggctgtgacctgtggctgaattggttcacagcaagataggagggagatttgtgcctgagggcagggcccgtggaagctaagggggttcccaatgcaggctrttgctctgaaaccagcaccttaattttaaaaggctcagtaagcagacaaagcgatcttagtgcccagtagtgtgttatagtggaaaggacatgggtgctt

SEQ ID NO: 51807 - DNA, 201 bp, Homo sapiens
ctttcactcctggcacagtgagggaacaagttatagggctaggttccttttcttaacaaaaaatctccaatatacatataaatcagacaaaaaatggcaayaacaataaaactcacaaaataagtttccagaaaaaaaaggccatatcataaacttttaaaaattgaaaaccattttaaatgtcatttaacagaaagttat

SEQ ID NO: 51808 - DNA, 201 bp, Homo sapiens
ccagcctcccccatttcctcacctttctagtatctgcattcagcactcaccattctcccagtactcctacccctgctcttactccccagggcttcaagatcccccccttccccctacccctcacttaactacactcctccctcctttctcttcccagtgcctttctctaatggtggggtttcttctgggctccagtattgg

SEQ ID NO: 51809 - DNA, 201 bp, Homo sapiens
ctacatctcatcatgaaacctcccagacttcatcctgatctgtagtctcccctcttggccctgccttggtcctggctctactatctgctcactcctctgcsctctcccccttcctcatcgtcttaaatgctagttcaggggttcaagtcttctagggagtgggctgatggggcagcagggtaggtgcggctgtgacctctc

SEQ ID NO: 51810 - DNA, 201 bp, Homo sapiens
ggcacagtgagggaacaagttatagggctaggttccttttcttaacaaaaaatctccaatatacatataaatcagacaaaaaatggcaataacaataaaastcacaaaataagtttccagaaaaaaaaggccatatcataaacttttaaaaattgaaaaccattttaaatgtcatttaacagaaagttattttaatgtcta

SEQ ID NO: 51811 - DNA, 201 bp, Homo sapiens
ttaaatgctagttcaggggttcaagtcttctagggagtgggctgatggggcagcagggtaggtgcggctgtgacctctctgcttttccagggacactcagyctgcttctgagtagagaagcacaggtgtacagagagggtggctggggagggcccaggatccccaaaggtcagtgactggatggggctggcctgggttgct

SEQ ID NO: 51812 - DNA, 201 bp, Homo sapiens
gcagctctggggtctacacctgccaagcctccagcactgagggcagcgccacccacgccacccagctgctagtgctaggtgctctctggcgggagggctgsggtccagggttacctatgcaagggggctgtgacctgtggctgaattggttcacagcaagataggagggagatttgtgcctgagggcagggcccgtggaag

SEQ ID NO: 51813 - DNA, 201 bp, Homo sapiens; identical to SEQ ID NO: 51739

SEQ ID NO: 51814 - DNA, 201 bp, Homo sapiens; identical to SEQ ID NO: 51741

SEQ ID NO: 51815 - DNA, 201 bp, Homo sapiens; identical to SEQ ID NO: 51742

SEQ ID NO: 51816 - DNA, 201 bp, Homo sapiens
cccgcccgcctcgccgtgcctctggcggctccaattggccgccgcgggagggggattggcggtctccagggcgacgggaggcgctcggggcatccgaggckgggaggcgggtccgccccctattgtgtagcggcgagagtggagccgagcggtgcggagcaggtgagggagggggcgtactggaggtatagaagtggtggt

SEQ ID NO: 51817 - DNA, 201 bp, Homo sapiens
actgtgggctgaggccaccttcctccccttgtgcatcccacaggacccccagtcatcgtggtgccccccaagaacagcacagtcaatgcctcccaggatgyttcattggcctgccatgctgaggcataccctgctaacctcacctacagctggttccaggacaacatcaatgtcttccacattaggtggggtcaccctcat

SEQ ID NO: 51818 - DNA, 201 bp, Homo sapiens; identical to SEQ ID NO: 51743

SEQ ID NO: 51819 - DNA, 201 bp, Homo sapiens
accttcctccccttgtgcatcccacaggacccccagtcatcgtggtgccccccaagaacagcacagtcaatgcctcccaggatgtttcattggcctgccaygctgaggcataccctgctaacctcacctacagctggttccaggacaacatcaatgtcttccacattaggtggggtcaccctcattaggaaggtggaggtg

SEQ ID NO: 51820 - DNA, 201 bp, Homo sapiens; identical to SEQ ID NO: 51744

SEQ ID NO: 51821 - DNA, 201 bp, Homo sapiens; identical to SEQ ID NO: 51745

SEQ ID NO: 51822 - DNA, 201 bp, Homo sapiens
cacattgcagccgcctgcagccccgggtgcggatcctggtggacgggagcctgcggctgctggccacccagcctgatgatgccggctgctacacctgtgtrcccagcaatggcctcctgcatccaccctcagcctctgcctacctcactgtgctctgtaagcctgaccccagcttctccctcagcctgctcccttcccctg

SEQ ID NO: 51823 - DNA, 201 bp, Homo sapiens
cagcctgatgatgccggctgctacacctgtgtgcccagcaatggcctcctgcatccaccctcagcctctgcctacctcactgtgctctgtaagcctgaccycagcttctccctcagcctgctcccttcccctgggccaggccaagcccctctcccccaacttgccactactttcccccagacccagcccaggtgacagcta

SEQ ID NO: 51824 - DNA, 201 bp, Homo sapiens
gcagaggtcaaggtggggatgagcaatgtgatgtagaggggaggaggctggaggcagggagactggcaagtaggctgttggagaaacccaggtgagacatrccacaggtgtaaaggtgaggacagcagagaaggggaaatgtttaggaggtaggatttgaaaaacctaatgagcaagtagatatgggaggtaatcgaggaa

SEQ ID NO: 51825 - DNA, 201 bp, Homo sapiens
ggctgctgataatagccctgagggattaggggctttggcaggcggggtctgggttccccctgctagggcctcaaacactgctgaggttttcagggaaacartcctctatcaggagtactcccaggagctcacaccttcccctacataaagagcccagaggtggacagatcctgtaagagtccagaggagactacatgctgg

SEQ ID NO: 51826 - DNA, 201 bp, Homo sapiens
ggggtccctctgcaggaaggaaaggaagcactggaaatcagagaggggtcaggcctagacatggagctgctggagtcttctgcacagctgtgggtttctcrtcctgccccctctcttgtactgccatcccgggcttgtctctgctgagctcctctctctagctgtcatcttctcttccttccagttccctggctggtccca

SEQ ID NO: 51827 - DNA, 201 bp, Homo sapiens; identical to SEQ ID NO: 51748

SEQ ID NO: 51828 - DNA, 201 bp, Homo sapiens
tgcaaacaacataagattaagaaaatgcagccaggcacagtgactcacagcttaatcccagcgctttgggaggctgaggcaggaggatcccttgaggccaygagtttgaaaccagcctgggcaacatagcaagacccctctcttcaaaaattaaacaattagccaggcatggtgacacgtgcttgtactactagctacttg

SEQ ID NO: 51829 - DNA, 201 bp, Homo sapiens; identical to SEQ ID NO: 51750

SEQ ID NO: 51830 - DNA, 201 bp, Homo sapiens
gtatttcaccagggggagtgagggaacgtgaggaggcagacttcagcaagaaggatggcgggccctttaatagagaaataggagctggttttgggtggaasactctgaacttagttgtggagtgctgggaagagagccaggtgaagtcccagcaggcaggaagccccacgcggcccaactacaggggtggccattcacagt

SEQ ID NO: 51831 - DNA, 201 bp, Homo sapiens
ccagtcctgctagagaagcaatgggtggaggtagaaatggggatgggggaggagatcggatgagcccgggacctgggtggatcccctgggaggagggcggsgagtcatgctccccgcctggttctcctacccccaggctcagatttcaaccctcgctgccgcctctgtggcgcgcccgttcggggagcggagagggtcgcc

SEQ ID NO: 51832 - DNA, 201 bp, Homo sapiens
ggtgaggtattgggcacctgggttagggccagagacagagaagtaattcaagaggtgacaagcagggatacaaatggtaaatgagcagagttaaactgackcccccaaacacacacaccattcctaggcagtggaactgcatgaatggagttgctcttgatggaacagagagaatttggaaagaagaatgggtctcaggga

SEQ ID NO: 51833 - DNA, 201 bp, Homo sapiens; identical to SEQ ID NO: 51752

SEQ ID NO: 51834 - DNA, 201 bp, Homo sapiens; identical to SEQ ID NO: 51753

SEQ ID NO: 51835 - DNA, 201 bp, Homo sapiens; identical to SEQ ID NO: 51754

SEQ ID NO: 51836 - DNA, 201 bp, Homo sapiens; identical to SEQ ID NO: 51755

SEQ ID NO: 51837 - DNA, 201 bp, Homo sapiens; identical to SEQ ID NO: 51756

SEQ ID NO: 51838 - DNA, 201 bp, Homo sapiens; identical to SEQ ID NO: 51757

SEQ ID NO: 51839 - DNA, 201 bp, Homo sapiens; identical to SEQ ID NO: 51758

SEQ ID NO: 51840 - DNA, 201 bp, Homo sapiens
gtctgagttgagctcgcaacctctccgtcatctccctgatgccagttgctctgggcctctggcgtctaccccatagggatgctggattattagccgagatygtggagccttgacttctgcttgtgattagtattactgtcctgcctgtgtccctgcctatagatttccatgtcttaggccttctctttggagtcttgtcct

SEQ ID NO: 51841 - DNA, 201 bp, Homo sapiens
gagcctaggtgacattttggagctctgggctttgatctgctactcgcctctggcctgtgaccctgtgttcagcaaacttccattgagccacagcctctttstccaagaagtgcacactggaagagagaagcaggcagagaggcagcttggagctcctacagagacacagttaggcaagcgacttggtgccacagagacagg

SEQ ID NO: 51842 - DNA, 201 bp, Homo sapiens
aaatgatggcaaagagtcaagaaggagaactgaagtttctttcgtgtgatgactgggaaattgtgtgtcccgggggaacacacacttcttaccaggtgctrtgtggggtagtgggttgagggcaggggcaaggaggcatccatccttaaagtgggcaccatctgggcagaggacagcaacactgtctggaaggccagggat

SEQ ID NO: 51843 - DNA, 201 bp, Homo sapiens; identical to SEQ ID NO: 51759

SEQ ID NO: 51844 - DNA, 201 bp, Homo sapiens; identical to SEQ ID NO: 9068

SEQ ID NO: 51845 - DNA, 201 bp, Homo sapiens; identical to SEQ ID NO: 9069

SEQ ID NO: 51846 - DNA, 201 bp, Homo sapiens
gttacatgagccaagccctcactgtacagaagagtgagagctgaaacctgttccctgagctgatcagaaggacatcccttggcccctccatctgggctccygtggataggaggggctgggtgagcaggccagctgggctatggtgtggtgcctcggcctggccgtcctcagcctggtcatcagccagggggctgacggtaa

SEQ ID NO: 51847 - DNA, 201 bp, Homo sapiens
ccacagggcgggctgagcagagaggggaggaggtgcaggcaggtgatgcagaagggaagtttcttttcaaactgggggcagttattggcaaacagcctggkgggagtgtatgtgtctacacaagccctgtgggaatggatgaaagcgggccccaattagcaccagtggagaaaaaaacggctgtgcccaccagccctccct

SEQ ID NO: 51848 - DNA, 201 bp, Homo sapiens; identical to SEQ ID NO: 51763

SEQ ID NO: 51849 - DNA, 201 bp, Homo sapiens
tctgagagacagagagagagacagagagagaaaagaagaagaaggagaaggaggaggaggaggaggaggaggaggaaaagcagcagcagaggaggaggagragaaggaggaggaggaggaaagaggaaagaagaaagcaggagaaggagaagaaggaggaagaagaggaggaggaggaggagggggagagagagaatattt

SEQ ID NO: 51850 - DNA, 201 bp, Homo sapiens; identical to SEQ ID NO: 51764

SEQ ID NO: 51851 - DNA, 201 bp, Homo sapiens
gggcaggtggtggagaaggacggggaggaggaggatggggatctctggctggtgggagaaaggggaagagggagttctatttccatcccacaaacagctcygatgccccacccttcctgagagcccttgtttgctcacttagtagttgcatctcacccctcccccacactcctgcccttttcagttcttcaaatataaatt

SEQ ID NO: 51852 - DNA, 201 bp, Homo sapiens
agcttcctggcccaggatgtaatgagataggggcttggatgactacatggagaaatgatgtgccagggattctggggccaagtagtgcttaggcccatccyggaggttctctcatgatgctgcagcagtgattctgtgagtctgatgcctggtgcactcagtttgagtcttagtacttcggattgggatgagatcagcacg

SEQ ID NO: 51853 - DNA, 201 bp, Homo sapiens
ctggggggcaggtggtggagaaggacggggaggaggaggatggggatctctggctggtgggagaaaggggaagagggagttctatttccatcccacaaacrgctctgatgccccacccttcctgagagcccttgtttgctcacttagtagttgcatctcacccctcccccacactcctgcccttttcagttcttcaaatat

SEQ ID NO: 51854 - DNA, 201 bp, Homo sapiens
gaggaagtggcgccagctgccagccccgggacctgtccagacctggaggatgctgcctggatcccccatactggcaggtgggggaggcagctcctcctctyccaagtgcctgactcactcactgccaaagcagtgtagggagactgaatggagaaaggcctcgggtcctcagcttccagagtttttcatagaggctgggga

SEQ ID NO: 51855 - DNA, 201 bp, Homo sapiens
tcctggaccagcacatccctgaagacgattttgctaacggctcctgggtgcatctgacagtcaattgtatgaagctggggggcaggtggtggagaaggacrgggaggaggaggatggggatctctggctggtgggagaaaggggaagagggagttctatttccatcccacaaacagctctgatgccccacccttcctgaga

SEQ ID NO: 51856 - DNA, 201 bp, Homo sapiens
tatgaggaaccccagttctcttctggcttagtttttcaagaccctcagaatgcaggcatccccagaatccttccacatttcctaagaccttcccaactctmccagcctcccccatttcctcacctttctagtatctgcattcagcactcaccattctcccagtactcctacccctgctcttactccccagggcttcaagat

SEQ ID NO: 51857 - DNA, 201 bp, Homo sapiens
cagtcgagctggactcatgcctaggtctatctggctcccaagtgtgtgcttgtatcacgaggctacactgccagggacccatgaagctgtctggggtgcayagttgcatccagggagggtgctgagggcttgggtaggcaccctcggtctgagcctggcagtgtggtgtggatgctgactaagagtgggattgaggtgtct

SEQ ID NO: 51858 - DNA, 201 bp, Homo sapiens
cctgattacgtgggtaagagttctcctcaggtgggaggtagggaggtatcagcaagaaaggtgggctgggtagagtcgcacaaggcctcctatgaacggcwttgtccctgctctgatctcatctccagctctgctgccttaactctgcttaataagcatggctgtgctcccaagcagtgttaattcattgaaagattcatt

SEQ ID NO: 51859 - DNA, 201 bp, Homo sapiens
agtgcaatgtctgggcgcagttagcaccattttttgaacttctttgtggatgtgtggacgtgaacttgcccatttaggtgactgtgggttccctgccttcygagagcttaagagagcagagactgtgtctcctgttttcttcacacgccgctgcatatgggaagatctgaagtcaacaggctttagccctgcaggtggagg

SEQ ID NO: 51860 - DNA, 201 bp, Homo sapiens
aagcacaggtgtacagagagggtggctggggagggcccaggatccccaaaggtcagtgactggatggggctggcctgggttgctgctttaggtggcacctrttgggacttaaaatcgtgtgtagcctccctgggcgccttctgctgcaccccagctggctccctagaatggctacaatggctctgcttcctcctaatcccg

SEQ ID NO: 51861 - DNA, 201 bp, Homo sapiens
ccccctcccagcactgaccctagccccccgttgtgccctcatgccacccatcatgcaggtcgagggaagcctgaggtggtatcggtggtgggccgggctgrggagagtgtggtgctgggctgtgacctgctgcccccggccggccggccccccctgcatgtcatcgagtggctgcgctttggattcctgcttcccatcttc

SEQ ID NO: 51862 - DNA, 201 bp, Homo sapiens
gggagagggccgcatggcaggaggcatgcctaacattgctgtgggtctcttcttcctctttgtttttgagggggaggatgctgatctccaaagtatcttcyaaaaaaggaacaagaagtatgtgcaggggtcagtggaatgcattcaactgggcaaccaatgagaccaaggataccttccttttaggaaagtagaacacat

SEQ ID NO: 51863 - DNA, 201 bp, Homo sapiens
gagagacagagagagagacagagagagaaaagaagaagaaggagaaggaggaggaggaggaggaggaggaggaaaagcagcagcagaggaggaggaggagraggaggaggaggaggaaagaggaaagaagaaagcaggagaaggagaagaaggaggaagaagaggaggaggaggaggagggggagagagagaatattttct

SEQ ID NO: 51864 - DNA, 201 bp, Homo sapiens; identical to SEQ ID NO: 51772

SEQ ID NO: 51865 - DNA, 201 bp, Homo sapiens; identical to SEQ ID NO: 9061

SEQ ID NO: 51866 - DNA, 201 bp, Homo sapiens; identical to SEQ ID NO: 9062

SEQ ID NO: 51867 - DNA, 201 bp, Homo sapiens; identical to SEQ ID NO: 51775

SEQ ID NO: 51868 - DNA, 201 bp, Homo sapiens
gatttgggagctcgccaatgcagacaggtatttccagtcctgctagagaagcaatgggtggaggtagaaatggggatgggggaggagatcggatgagcccsggacctgggtggatcccctgggaggagggcggggagtcatgctccccgcctggttctcctacccccaggctcagatttcaaccctcgctgccgcctctgt

SEQ ID NO: 51869 - DNA, 201 bp, Homo sapiens
agggcccttatttgtcacagaggggtgaaggcgacagcactggttccatcttgctgctataccttgtgagcatcaagagtaaggaaagaagcgagagcagsctaggccatgagagtcttgatctaccatacttccttcaaaaatatttttccaagcatatgaggaaccccagttctcttctggcttagtttttcaagaccc

SEQ ID NO: 51870 - DNA, 201 bp, Homo sapiens
gaggatgttgatggggagacccccaccttttccctctttagtttgaatcctgagggaaaccccgggattggctgagccttgccacagggcgggctgagcasagaggggaggaggtgcaggcaggtgatgcagaagggaagtttcttttcaaactgggggcagttattggcaaacagcctggtgggagtgtatgtgtctaca

SEQ ID NO: 51871 - DNA, 201 bp, Homo sapiens
gaggggaaggagtagtggaactgtagtagccagaggtgcttttgcaggaggtatgtggcgcggccaggcccttgggaggggcattccagaccgggggtgcrgggagcaaaggcatggagatgggggacagccagctgcccatactgacctgaaagagttcatgagggctgacatatggaaagatggctggccacgtaggga

SEQ ID NO: 51872 - DNA, 201 bp, Homo sapiens
aaagaggacacagtcattcccttgcagaaaccagggtcaagaggcaggaagtagtatagtacgtttatggaatcatggatcgtccaattgggtgggagccrgagtgcctgcagggacatgaatggtgcagagaaagctggaaagacaggttagcatcaaaaggaagaactggatgccaagttactattgcctcattccaag

SEQ ID NO: 51873 - DNA, 201 bp, Homo sapiens
ttatcgggaggagaggatggggagaagtggctggggggtggggagaccagaagggagttctttatagtgcaggagacctgctgcaattggagatcaggtgygagaagctggaattgtggggggattgtgcgtagtagcgataactgggaagggagtaatgggaggacgagggagtggtgtgtggggagactagaagggtga

SEQ ID NO: 51874 - DNA, 201 bp, Homo sapiens
tcctgtttgccccaactctcactaaccttgaccgtgctgcctccctctctggggctctgggaggaagaatgttctgcagaggtttgtacatctctgagagycctgcctaagcctgccagcccttactacaccaccattttcctccagcccctacccactggggaacagaaacagagccagagaggaattgagagatggaga

SEQ ID NO: 51875 - DNA, 201 bp, Homo sapiens
catgtgttccacctttcagggttcatttgatatcaagtaattctctgcttatctatagacaatgagaaactttgctgattaggaacacctgtgcttaacgrtgccaagcagacatctctgaggtcacaccatcttctttgtgcagggctatggagcagctcaggtcctttcttcccaaggcctgctgaaatattaggtata

SEQ ID NO: 51876 - DNA, 201 bp, Homo sapiens; identical to SEQ ID NO: 51778

SEQ ID NO: 51877 - DNA, 201 bp, Homo sapiens; identical to SEQ ID NO: 51779

SEQ ID NO: 51878 - DNA, 201 bp, Homo sapiens; identical to SEQ ID NO: 51780

SEQ ID NO: 51879 - DNA, 201 bp, Homo sapiens; identical to SEQ ID NO: 51781

SEQ ID NO: 51880 - DNA, 201 bp, Homo sapiens
gagaataccccagctctgagagacagagagagagacagagagagaaaagaagaagaaggagaaggaggaggaggaggaggaggaggaggaaaagcagcagmagaggaggaggaggagaaggaggaggaggaggaaagaggaaagaagaaagcaggagaaggagaagaaggaggaagaagaggaggaggaggaggaggggga

SEQ ID NO: 51881 - DNA, 201 bp, Homo sapiens; identical to SEQ ID NO: 51782

SEQ ID NO: 51882 - DNA, 201 bp, Homo sapiens
tcttcaaatataaattcaatcagccttctaggctcggtgtcaggaactccctctttctcttccctcctgcttccctggccagggaagtgggtgggagagaggggctcttgggccctgagtgaaacacagctcacatatatatagcaccttgtgttttcaaaataccttttcacccaagcccttattatttatctctcactc

SEQ ID NO: 51883 - DNA, 201 bp, Homo sapiens; identical to SEQ ID NO: 51784

SEQ ID NO: 51884 - DNA, 201 bp, Homo sapiens; identical to SEQ ID NO: 51783

SEQ ID NO: 51885 - DNA, 201 bp, Homo sapiens; identical to SEQ ID NO: 51785

SEQ ID NO: 51886 - DNA, 201 bp, Homo sapiens
agaataccccagctctgagagacagagagagagacagagagagaaaagaagaagaaggagaaggaggaggaggaggaggaggaggaggaaaagcagcagcrgaggaggaggaggagaaggaggaggaggaggaaagaggaaagaagaaagcaggagaaggagaagaaggaggaagaagaggaggaggaggaggagggggag

SEQ ID NO: 51887 - DNA, 201 bp, Homo sapiens
ggcttggctctcccccaggctctggacatccaacctgggttcagccccaggccagtgtgtgggggtgggttgacagaatcctcatttggcctgggtgcagyagacagggtggccctgggctgaggactcctatgaggcagggctggtgggtgggcagcaggctggagccctgagtggtctccctggcccttggacactgct

SEQ ID NO: 51888 - DNA, 201 bp, Homo sapiens
tctcatcctggcagatacatttgcttaacaactccatccatcccagactagtctagaagctctcctaaatagggaggtaggaaggacctcattcagacctwccctgggtctgagttgagctcgcaacctctccgtcatctccctgatgccagttgctctgggcctctggcgtctaccccatagggatgctggattattagc

SEQ ID NO: 51889 - DNA, 201 bp, Homo sapiens
ggtctacacctgccaagcctccagcactgagggcagcgccacccacgccacccagctgctagtgctaggtgctctctggcgggagggctggggtccagggytacctatgcaagggggctgtgacctgtggctgaattggttcacagcaagataggagggagatttgtgcctgagggcagggcccgtggaagctaagggggt

SEQ ID NO: 51890 - DNA, 201 bp, Homo sapiens; identical to SEQ ID NO: 51786

SEQ ID NO: 51891 - DNA, 201 bp, Homo sapiens; identical to SEQ ID NO: 51787

SEQ ID NO: 51892 - DNA, 201 bp, Homo sapiens
aaaacccgcttcactcttttaccatttcttctagccttgcttccatgctgcattcattaacatgtttccattatagtcttatcaatagatcagggtattaygttgaaatgcattgttgaaaagctgctactttgggactatttgcaggagggatggtgggagagactggcccactgctcctgcctcttcccttccatctca

SEQ ID NO: 51893 - DNA, 201 bp, Homo sapiens; identical to SEQ ID NO: 9063

SEQ ID NO: 51894 - DNA, 201 bp, Homo sapiens
cggaggttctctcatgatgctgcagcagtgattctgtgagtctgatgcctggtgcactcagtttgagtcttagtacttcggattgggatgagatcagcacgttgctttcatggaaggcttccaagggagccaactgaatgggaaggacctggacaggcaatgttgcttaagccgacccagcatccctacagcatcaccagg

SEQ ID NO: 51895 - DNA, 201 bp, Homo sapiens; identical to SEQ ID NO: 51789

SEQ ID NO: 51896 - DNA, 201 bp, Homo sapiens
ttagccttggggtgggtatgggggtgttcctcaagggttcctctttgagcatgtgagggcaggggaggaatagggctggttctggagaagctgaactgggrgtttctccagtcacccaaagtcctaaggtgcctacagagatactgatggcactccccctcccagcactgaccctagccccccgttgtgccctcatgccac

SEQ ID NO: 51897 - DNA, 201 bp, Homo sapiens
agctgccttgggagctgacttggcaaccccacgctcagagcacagccttcctcagctgcacacggtgggaggcgcctgggcaagatttgggagctcgccartgcagacaggtatttccagtcctgctagagaagcaatgggtggaggtagaaatggggatgggggaggagatcggatgagcccgggacctgggtggatccc

SEQ ID NO: 51898 - DNA, 201 bp, Homo sapiens; identical to SEQ ID NO: 9065

SEQ ID NO: 51899 - DNA, 201 bp, Homo sapiens; identical to SEQ ID NO: 51792

SEQ ID NO: 51900 - DNA, 201 bp, Homo sapiens; identical to SEQ ID NO: 51790

SEQ ID NO: 51901 - DNA, 201 bp, Homo sapiens
tgctcttactccccagggcttcaagatcccccccttccccctacccctcacttaactacactcctccctcctttctcttcccagtgcctttctctaatggwggggtttcttctgggctccagtattggccaactctgcatgttgccttgtacttttcatttagatctggtggttctccggagagcagcttcctcgggtgtt

SEQ ID NO: 51902 - DNA, 201 bp, Homo sapiens; identical to SEQ ID NO: 51794

SEQ ID NO: 51903 - DNA, 201 bp, Homo sapiens; identical to SEQ ID NO: 51795

SEQ ID NO: 51904 - DNA, 201 bp, Homo sapiens; identical to SEQ ID NO: 51796

SEQ ID NO: 51905 - DNA, 201 bp, Homo sapiens; identical to SEQ ID NO: 51797

SEQ ID NO: 51906 - DNA, 201 bp, Homo sapiens; identical to SEQ ID NO: 51798

SEQ ID NO: 51907 - DNA, 201 bp, Homo sapiens; identical to SEQ ID NO: 51799

SEQ ID NO: 51908 - DNA, 201 bp, Homo sapiens; identical to SEQ ID NO: 51800

SEQ ID NO: 51909 - DNA, 201 bp, Homo sapiens
caggctcctgggagttctatcctcccagcctatcccctctccttttcttgttcacagatcccatggacctgatgccaagctgctggctggtggggaggatktggctccaggccccctgggtctggggcagctgctggctgtggctagccaggtcgctgcggggatggtgtacctggcgggtctgcattttgtgcaccggga

SEQ ID NO: 51910 - DNA, 201 bp, Homo sapiens
ctcaagtgtgggcctgagccctgtgactcccatccgctctccccacagctacatcgagaaccagcagcatctgcagcatctggagctccgtgatctgaggrgcctgggggagctgagaaacctgtgagggaaacggggactgtgggtgtggagctcagcatgggcctgggggagaccagaaggtcagggagggctcaagca

SEQ ID NO: 51911 - DNA, 201 bp, Homo sapiens
tctagtgggccagggactggtggtcaagattggtgattttggcatgagcagggatatctacagcaccgactattaccgtgtaagggtcctttgtccccaaygccttcccctgcatccaaactgtagacaccctggatcccaagaccactgagagcctgcccttgctaggatggctgcatgggtctgagattcactggctct

SEQ ID NO: 51912 - DNA, 201 bp, Homo sapiens
tccccagcttgagacggatgggttagtgcagccacggaggcttgcgcggtgggaggggttgggaccagccttctgctgccctgggtgctggggatcccggrgctttccaggtgctcggcctccaaggtgcgcggtcctcagctccacccgcgggcggctcctgcgtccgaggagctaagagaagatctattaatttcttca

SEQ ID NO: 51913 - DNA, 201 bp, Homo sapiens; identical to SEQ ID NO: 9082

SEQ ID NO: 51914 - DNA, 201 bp, Homo sapiens
agggtgggacccttgttagtcagctctgctttcccccagttgtgcccagtccagggctggaaccactgggcactcaggaaccatggacaatggatgtctgkatcccaagttcactccttccttggggacctgggtgtgtctcgcttcttcactagggcccaagccccacttccctttctctccctggactctcttgctccc

SEQ ID NO: 51915 - DNA, 201 bp, Homo sapiens
ctccaaggagggtgggacccttgttagtcagctctgctttcccccagttgtgcccagtccagggctggaaccactgggcactcaggaaccatggacaatgratgtctggatcccaagttcactccttccttggggacctgggtgtgtctcgcttcttcactagggcccaagccccacttccctttctctccctggactctc

SEQ ID NO: 51916 - DNA, 201 bp, Homo sapiens
ctcccccttctgctttatttttctctataattcttaacactgactaatgtgcgtgtgtgtgtgtgtgtgtgtttgtatgtgtataatattttgagacatgktctcactctgttgcccaggctagagtgtagtgggaggatcatagtttgctgcatacttgaactcctggcctcttcaagtaatccctctgcctcggcctcc

SEQ ID NO: 51917 - DNA, 201 bp, Homo sapiens
agtctcagctactcaggaggttgaggtgggaggatcgcttgagcccagaaggtcaaggctgcagtgagccgtgatcacgccactgcactccagcctgggcracagagtgagaccctgtctaaaaataattataataaaataaataaaattgtgacactttctactcccccttctgctttatttttctctataattcttaac

SEQ ID NO: 51918 - DNA, 201 bp, Homo sapiens
gcacacctatagtctcagctactcaggaggttgaggtgggaggatcgcttgagcccagaaggtcaaggctgcagtgagccgtgatcacgccactgcactcyagcctgggcgacagagtgagaccctgtctaaaaataattataataaaataaataaaattgtgacactttctactcccccttctgctttatttttctctat

SEQ ID NO: 51919 - DNA, 201 bp, Homo sapiens
ctagctgcaggggacttgccaggctgcagagagtgtgaggtgaggaagggccttctccctccctctgacaccctgtgggctccaggtccctgcgctgatcyagaaggccctgatgtaggaagagcctccagcctcccctgccccgtgtccctcgtttactcttctcctactccctgattttccctagtgagaatttctctc

SEQ ID NO: 51920 - DNA, 201 bp, Homo sapiens
tgcagcatctggagctccgtgatctgaggggcctgggggagctgagaaacctgtgagggaaacggggactgtgggtgtggagctcagcatgggcctggggkagaccagaaggtcagggagggctcaagcatccgagggcctgggaggacctgagaggctgagcactgagggactgggagaagtcaggaagctcagggcttt

SEQ ID NO: 51921 - DNA, 201 bp, Homo sapiens
ggggagctgagaaacctgtgagggaaacggggactgtgggtgtggagctcagcatgggcctgggggagaccagaaggtcagggagggctcaagcatccgarggcctgggaggacctgagaggctgagcactgagggactgggagaagtcaggaagctcagggctttgaggggtctagagtagttgaggaaacaatgagggg

SEQ ID NO: 51922 - DNA, 201 bp, Homo sapiens
ggtaggtgccgggtgagggaggtggtgtaagggggctggggaagagacctacctgcctgagggagagggcactgagcaagcactgaaaaggcctggggaaygggcactggcaaaggctgggggaaactgcctggggtgacatcgcctgggctccaggtcattgaggagggtgggggaaggagcagccccgcagtagagttc

SEQ ID NO: 51923 - DNA, 201 bp, Homo sapiens
ccccagccctattccagccataggccctgtcatattcttctcaggctgagtccagcctggctcttagctgcatcccctgcccagagtcacagctagcccamaccatgtcctctcggggcaggtgcagccccacactatgacatggggcttgctgaaggggtgcaggttgaattttagcccccatgcagtccctcgtctggg

SEQ ID NO: 51924 - DNA, 201 bp, Homo sapiens
cctccatagaaagatggagacagacacacaaactctacccctccctgcctcagctcccttcgaatggcttcaggacttgagtctcagtttaggtgtccctwcctctaggaagccttccctggctttttccattcccacccgtggtgcctgccaggtgcccctcacactgcactgccatgacctgcttatctgcatcatact

SEQ ID NO: 51925 - DNA, 201 bp, Homo sapiens
gaaccatgggctgtctctggtgggagccctggaggtgggcacacctgttccgctcctccatcccacccctctggacagctgcctctactgttctctcaatyctccacttccaggcccccagtctcctctcccatcacacgcggctgctggggatcgccttcctcaggctcctgggagttctatcctcccagcctatcccct

SEQ ID NO: 51926 - DNA, 201 bp, Homo sapiens
ctctggtgggagccctggaggtgggcacacctgttccgctcctccatcccacccctctggacagctgcctctactgttctctcaattctccacttccaggyccccagtctcctctcccatcacacgcggctgctggggatcgccttcctcaggctcctgggagttctatcctcccagcctatcccctctccttttcttgtt

SEQ ID NO: 51927 - DNA, 201 bp, Homo sapiens
cgccatcacgcccaactaatttttgtatttttagtagagatggggtttcaccatgttggccaggatggtctcgatctcctgacctcgtgattgcccacctyggcctcccaaagtgctgggattacaggcgtgaaccaccgagcttgtgtatttatttttaatgatggggctggggtaggctgtgccttgacgggctgtccc

SEQ ID NO: 51928 - DNA, 201 bp, Homo sapiens
gtggcaggtgggaggccgcaccatgctgcccattcgctggatgccgcccgagagcatcctgtaccgtaagttcaccaccgagagcgacgtgtggagcttcrgcgtggtgctctgggagatcttcacctacggcaagcagccctggtaccagctctccaacacggaggtcagccccggcccatggtcaccccttgctggcct

SEQ ID NO: 51929 - DNA, 201 bp, Homo sapiens
gaaaactgtgcagggcctctccttacaggaactgtgagtgggggcgcttccaggggcaagagcaccaagtgtgtgtgtgcctgtgtgcacttgggtctgtyggatgacattgggtcactgtgtctgtgtgacactgctggggggtctctttggggactatgtgcatgccagtgaaacccccatcaaagcaggggctgcagg

SEQ ID NO: 51930 - DNA, 201 bp, Homo sapiens
ctgctcggtcggtctgtgtgtccctgtctcggggacttggggggccatccgtgctggggccttggcggagagaaccgtgagcctctaggaggtcgtccttyccccgctccctggggccttgcctgtctccccgccaagagacacccctcttcccttcgctctccccagcttgagacggatgggttagtgcagccacggagg

SEQ ID NO: 51931 - DNA, 201 bp, Homo sapiens
tcatcttcactgagttcctggagccggcagccaatgagaccgtgcggcacgggtgtctgcgcctcaaccagcccacccacgtcaacaacggcaactacacrctgctggctgccaaccccttcggccaggcctccgcctccatcatggctgccttcatggacaaccctttcgagttcaaccccgaggaccccatccctggtg

SEQ ID NO: 51932 - DNA, 201 bp, Homo sapiens
gctggttttagtttcagtttgggatattttgtgcctattttgaggctactggttagattttagatttttcagataattaaatacgtgatccaggctgggcrcagtggctcacgcctgtaatcccaatactttgggaggccgaggtgagaggattgcttgaggccctgttcaagaccagcctgggcaggacagtaagacccc

SEQ ID NO: 51933 - DNA, 201 bp, Homo sapiens
aggttcctttttcagggaactcggttccccttctgcccctctgccacagcctgttggggggccctttccagcgccgtgcccacactgtgtcccctccactstggccctgttcttctcttcctcccttattcttgccttcacctactgtcctaagcccaggcccagttggcccctgggggaacctcaaagtgctttgtacaa

SEQ ID NO: 51934 - DNA, 201 bp, Homo sapiens
ggacagtaagaccccgtcgctacaaaaataaaacataaaataaaaaaaaaatgtgatccaggagatagtcaacgaacaaacctaaaggaggaaggccattmtctgctacattctctcccacccctctctcccttctcttccctcccagccctcctctcctttccatctggagccagaggggctctccaaagacttcagccc

SEQ ID NO: 51935 - DNA, 201 bp, Homo sapiens
cctcctacccagcccattgcatcactctcccatctccatgggaagaggagactcccctgcccctgggagcccccagtctgaggggcatcataggacctctygggcaagcacagagtctggattcctgagctgcttcagtttggaggggaatggtgggactggggaaggggatacctcctaatccttccctttttgaagctt

SEQ ID NO: 51936 - DNA, 201 bp, Homo sapiens
ccaccccctactcatctcttcttccctcaaaagaggatgtagggtggggggctggaagaaagggtgggatgtgtgtctccacagctgctccctcccagctrtttccagattcccatgaaaacctgatcctttgggggaagtcctggggtcttgtcaaggccagagggatggagatggatttctttctggccccctgcccga

SEQ ID NO: 51937 - DNA, 201 bp, Homo sapiens
cacgaagctgggaggaatcttcagcattctgcaggactctgacattctgcaggaattggttacaaaatactcaagtactttttagcagctggtgaaacctmtgggagtatgcggtaatgactggcctggaggtactcaggcatcatatggtgatggctggaaaatacttgaatattacatatggctatcatggccagcaag

SEQ ID NO: 51938 - DNA, 201 bp, Homo sapiens
tgatcctttgggggaagtcctggggtcttgtcaaggccagagggatggagatggatttctttctggccccctgcccgagccttgctacctgaggccctcarcgccagatgcccggctgttcccactgctccgaagtattttttcatgcccgtccctcatcgggtccttctccccgcatcctagtttcaaaagaggaaattc

SEQ ID NO: 51939 - DNA, 201 bp, Homo sapiens
ggggtactgctggcctgggtcccacccccaggagctccatcacatcaggacagagtggggggagatgcagagggctgacatggctggataccggggtgggygggctgccctgggtgaacagcagtgagggctcggcccccaactcagtcctgtccctgccgcttccatccaggcactgaaggaggcgtccgagagtgctcg

SEQ ID NO: 51940 - DNA, 201 bp, Homo sapiens
cttattccctgatcccaaccactccctctagctgcaggggacttgccaggctgcagagagtgtgaggtgaggaagggccttctccctccctctgacacccygtgggctccaggtccctgcgctgatccagaaggccctgatgtaggaagagcctccagcctcccctgccccgtgtccctcgtttactcttctcctactccc

SEQ ID NO: 51941 - DNA, 201 bp, Homo sapiens
ctccctgattttccctagtgagaatttctctctcagctcaccgcctctgggcagccctccgggattggacagggaactttgtacccttgaagggtgtttcygaggacacaaatcctcgtagaccctgagacaggtctccaagagtatggacctggagtgcgaaacatgccttaaaggctttgtatcccttatccctgtggc

SEQ ID NO: 51942 - DNA, 201 bp, Homo sapiens
gtggcctcctgttcctgagtgccaggaagtccttcctacagtctaccctcgtgcttcccacctggatctgaaggggttacacagctccaggcccgcccacrgcaggtcccagctgcctggggcctgtggtcagagctaatgtaggcgagagttggaggacaagaggggataaagttattagcgtcttcatctttgaggaat

SEQ ID NO: 51943 - DNA, 201 bp, Homo sapiens
cacccctgggatgctggggagtgaggtggccccattgctctaagcaacagtaccctcccagactgtctctctctgtctcccaccccagcgcggatggactsccgtgctaagatggaaagtttgagcagcagtggctctggagtggtgggcaggatggagatctggaggcaggaaagacagacaagacaggccagagctgca

SEQ ID NO: 51944 - DNA, 201 bp, Homo sapiens
cctggcctacccccacacggcctagacacacatgtgcaaacacagacacatgcacacatatgcacacacatacacagacacagagccccctccccaatcaytggattccgctgtcattaacagtgcccccctccacctcgctgtggcccttgccccctccctgttaattacctcctggctgtgccaagtccattagctgcc

SEQ ID NO: 51945 - DNA, 201 bp, Homo sapiens
caacgccttcccctgcatccaaactgtagacaccctggatcccaagaccactgagagcctgcccttgctaggatggctgcatgggtctgagattcactggytctggttttcaacctacctcctcggctcctggtggagggggctctgtctccttcgctatcccagatggaaacagcaccttcggtttttgcctcttagacc

SEQ ID NO: 51946 - DNA, 201 bp, Homo sapiens
gtgggctttctcctctgtctctccggtggccccaggcaatcgactgcatcacgcagggacgtgagttggagcggccacgtgcctgcccaccagaggtctasgccatcatgcggggctgctggcagcgggagccccagcaacgccacagcatcaaggatgtgcacgcccggctgcaagccctggcccaggcacctcctgtct

SEQ ID NO: 51947 - DNA, 201 bp, Homo sapiens
cagcctacagggccctgcacagtttgagcccttgtagcctctctgatttcatcctttttatcatcttcagccacattgacttctttgcttttccttatatrtaacaggagctttactactataacaagccagcaaagcttctgccttggggtctttgtccttctgttccttctggccagaatcctcttccctctacatggc

SEQ ID NO: 51948 - DNA, 201 bp, Homo sapiens
aaatggaatcatactgcgtgtattattttgtatctggtttctttcattcaacattatatttataagattcattcatgttaatgggagttgctatatgtagytcatgcaattcattgctaaatagtattcctatgtatgaatgctatattatatatatatatacatatatttatgcatacatacactttttttctatcattg

SEQ ID NO: 51949 - DNA, 201 bp, Homo sapiens
tcccagctggctgggagggaggtaggggtctgggagccagttctggggactcaccctctactgtatccaggccaaatcccaaggagaggaagatcacaggyaggcatgctccccagggccacagactaggcactgccattgtcccagccctggcttgtgtccagtcccggctctcctcccggtgactctggggagaacggt

SEQ ID NO: 51950 - DNA, 201 bp, Homo sapiens
atcaagtcactttgcctgtctaacctcacccatggtcctcatctgctgcaggaggcgatgccgctgctgttgtttctaactgctgctgtgctatttgcacyatctctttgtttctgatcttccttgggctgagactcagtttgttagaactgtgtgtaaaacaggaatgaataggcagtgaggtcctagtggggtctccaa

SEQ ID NO: 51951 - DNA, 201 bp, Homo sapiens
gcctgcctcttcctttctacgctgctccttgtgctcaacaaatgtggacggagaaacaagtttgggatcaaccgtgagtcggggctgcagagggctgtctrtctgtctgttctcctggctttgtttcctactggctcttcctgactctgtctctggggggctgtgcacatgggagttccagggcgtgtgagtgtgtttggg

SEQ ID NO: 51952 - DNA, 201 bp, Homo sapiens
aaatgggttaaatggaggagaagagaggctgctctccctcagttaggaggataaggggtggcagaccagctcaaggggaagagttattggccccacagtarttggaggggatgggacagccaagggaagcagagggcagggcagggcttcccctcgaagtggctggaacccagagcttgcacaaaaggctggaaactctac

SEQ ID NO: 51953 - DNA, 201 bp, Homo sapiens
cctgcctgagcaggacaagatgctggtggctgtcaaggtgagaccctgccccggggggtactgctggcctgggtcccacccccaggagctccatcacatcrggacagagtggggggagatgcagagggctgacatggctggataccggggtgggcgggctgccctgggtgaacagcagtgagggctcggcccccaactcag

SEQ ID NO: 51954 - DNA, 201 bp, Homo sapiens; identical to SEQ ID NO: 9098

SEQ ID NO: 51955 - DNA, 201 bp, Homo sapiens
gcacacctgttccgctcctccatcccacccctctggacagctgcctctactgttctctcaattctccacttccaggcccccagtctcctctcccatcacaygcggctgctggggatcgccttcctcaggctcctgggagttctatcctcccagcctatcccctctccttttcttgttcacagatcccatggacctgatgcc

SEQ ID NO: 51956 - DNA, 201 bp, Homo sapiens
gtgtatttatttttaatgatggggctggggtaggctgtgccttgacgggctgtcccaggcgcccctggaattgatgcagtgtccgcccgtggcaggtgggrggccgcaccatgctgcccattcgctggatgccgcccgagagcatcctgtaccgtaagttcaccaccgagagcgacgtgtggagcttcggcgtggtgctct

SEQ ID NO: 51957 - DNA, 201 bp, Homo sapiens
gtgaacagcagtgagggctcggcccccaactcagtcctgtccctgccgcttccatccaggcactgaaggaggcgtccgagagtgctcggcaggacttccarcgtgaggctgagctgctcaccatgctgcagcaccagcacatcgtgcgcttcttcggcgtctgcaccgagggccgccccctgctcatggtctttgagtata

SEQ ID NO: 51958 - DNA, 201 bp, Homo sapiens
aatacctcagcccctcgccttcctcaacccacctggcaagtcttcttaggatctgatcccagttttctggaagcaatcctaccccagcccaagcttcccakagtcgagccttaatccttctcacttctcagtgtcagagcagaaatgaatcctggggttgactgtgtccattcgggttattagcagctaagaagcccagac

SEQ ID NO: 51959 - DNA, 201 bp, Homo sapiens
ggcacagggcacagggcactggggctcctacatcattttcctgtgtggcctggagccgggcccctgctgggctcactttttccatccatacaacgaggggrctgggggtgtgggggtgtgggtcctttcctgcctgaccttttagtccctgaggagggcccggaaggaggaggaggaggggagctgaggaagtgcgtggag

SEQ ID NO: 51960 - DNA, 201 bp, Homo sapiens
gggatgggcagggagggccaggggcccagagtagctgagacctggggactgatcctcctgcacccctccccagcaccatcgtgaagagtggtctccgtttygtggcgccagatgccttccatttcactcctcggctcagtcgcctgtgagtgtggccagtgctgggcagtgggagttggggaggacacccagacttgggct

SEQ ID NO: 51961 - DNA, 201 bp, Homo sapiens; identical to SEQ ID NO: 9080

SEQ ID NO: 51962 - DNA, 201 bp, Homo sapiens
ttttcagggaactcggttccccttctgcccctctgccacagcctgttggggggccctttccagcgccgtgcccacactgtgtcccctccactctggccctkttcttctcttcctcccttattcttgccttcacctactgtcctaagcccaggcccagttggcccctgggggaacctcaaagtgctttgtacaaggagccca

SEQ ID NO: 51963 - DNA, 201 bp, Homo sapiens
atcgccttcctcaggctcctgggagttctatcctcccagcctatcccctctccttttcttgttcacagatcccatggacctgatgccaagctgctggctgktggggaggatgtggctccaggccccctgggtctggggcagctgctggctgtggctagccaggtcgctgcggggatggtgtacctggcgggtctgcatttt

SEQ ID NO: 51964 - DNA, 201 bp, Homo sapiens; identical to SEQ ID NO: 9090

SEQ ID NO: 51965 - DNA, 201 bp, Homo sapiens
ttcctcctcctctctatcctgccagccgaggccctagccctggtatgtggaggtgaggcaggttgtatgttttgaagggatagtgcttgcagaagagaagytcttattccctgatcccaaccactccctctagctgcaggggacttgccaggctgcagagagtgtgaggtgaggaagggccttctccctccctctgacacc

SEQ ID NO: 51966 - DNA, 201 bp, Homo sapiens; identical to SEQ ID NO: 9092

SEQ ID NO: 51967 - DNA, 201 bp, Homo sapiens
cactccctctagctgcaggggacttgccaggctgcagagagtgtgaggtgaggaagggccttctccctccctctgacaccctgtgggctccaggtccctgygctgatccagaaggccctgatgtaggaagagcctccagcctcccctgccccgtgtccctcgtttactcttctcctactccctgattttccctagtgagaa

SEQ ID NO: 51968 - DNA, 201 bp, Homo sapiens
ctgagccctgtgactcccatccgctctccccacagctacatcgagaaccagcagcatctgcagcatctggagctccgtgatctgaggggcctgggggagcygagaaacctgtgagggaaacggggactgtgggtgtggagctcagcatgggcctgggggagaccagaaggtcagggagggctcaagcatccgagggcctgg

SEQ ID NO: 51969 - DNA, 201 bp, Homo sapiens
tcctctgtctctccggtggccccaggcaatcgactgcatcacgcagggacgtgagttggagcggccacgtgcctgcccaccagaggtctacgccatcatgyggggctgctggcagcgggagccccagcaacgccacagcatcaaggatgtgcacgcccggctgcaagccctggcccaggcacctcctgtctacctggatgt

SEQ ID NO: 51970 - DNA, 201 bp, Homo sapiens
caacggtgttgcaataatagctcactgcagcctcaaattcctgggctcaagcaattctcccgccttagcctccccagtagctgggactacaggtgcacacsattgcacctggctctacaatttgttcttattatggttctatgtgctggtacatatatatcttgtatagtaatataaatatgtatttattttttatggcct

SEQ ID NO: 51971 - DNA, 201 bp, Homo sapiens
accatgttggccaggatggtctcgatctcctgacctcgtgattgcccacctcggcctcccaaagtgctgggattacaggcgtgaaccaccgagcttgtgtrtttatttttaatgatggggctggggtaggctgtgccttgacgggctgtcccaggcgcccctggaattgatgcagtgtccgcccgtggcaggtgggaggcc

SEQ ID NO: 51972 - DNA, 201 bp, Homo sapiens
agtgcagtggcacgatctcggctcactgcaacctctgactccctggttcaagcgattctcctgcttcagcctcccgagtagctgggattacaggccacacrccatcacgcccaactaatttttgtatttttagtagagatggggtttcaccatgttggccaggatggtctcgatctcctgacctcgtgattgcccacctcg

SEQ ID NO: 51973 - DNA, 201 bp, Homo sapiens
gcctggcccagattgggtctatttcaaacgcatatcttttttcaaaaagagtgtgtgtgtgtgtgtgtgtgtgtgtgtgtgtgtgtgtgtgtgtgtgtttkaagagatggggtctcagcctgttgcccaggctggaatgctttgggatcataactcactgcagccttgaactcctggcctcaagcgatcctcccacctcag

SEQ ID NO: 51974 - DNA, 201 bp, Homo sapiens
acctgagagccaccactgtttgtttatttatttatttaatttatttttttgagacggcgtctcactctgttgctaggctggagtgcagtggcacgatctcrgctcactgcaacctctgactccctggttcaagcgattctcctgcttcagcctcccgagtagctgggattacaggccacacgccatcacgcccaactaatt

SEQ ID NO: 51975 - DNA, 201 bp, Homo sapiens
cgcctggcccagattgggtctatttcaaacgcatatcttttttcaaaaagagtgtgtgtgtgtgtgtgtgtgtgtgtgtgtgtgtgtgtgtgtgtgtgtttgaagagatggggtctcagcctgttgcccaggctggaatgctttgggatcataactcactgcagccttgaactcctggcctcaagcgatcctcccacctca

SEQ ID NO: 51976 - DNA, 201 bp, Homo sapiens
tgggctttctcctctgtctctccggtggccccaggcaatcgactgcatcacgcagggacgtgagttggagcggccacgtgcctgcccaccagaggtctacrccatcatgcggggctgctggcagcgggagccccagcaacgccacagcatcaaggatgtgcacgcccggctgcaagccctggcccaggcacctcctgtcta

SEQ ID NO: 51977 - DNA, 201 bp, Homo sapiens
tatgcctctgtgtgtgcgcatgtgcatacctaggtgtgtgcatgtgtgcaagaggtatgtgagaatgtgcatatgtgtgagggtgtggggatccatatgtrtgtgcgcttgtgtgttcatgcacacacatgtgcatgtgtgacttgaggtgcgtctctgtgcacatgtatgcatttgtgtgtgcacgcctgtgtaagtgtg

SEQ ID NO: 51978 - DNA, 201 bp, Homo sapiens
ggtccccaggggaggatgaggcaggtctggagacctggctccgggctcccatgcaggatgaaaaaatggcttactacaggaggctctgagagtacaggagsagcccctggatctaactacccctgtcccccaccaggtctcggtggctgtgggcctggccgtctttgcctgcctcttcctttctacgctgctccttgtgct

SEQ ID NO: 51979 - DNA, 201 bp, Homo sapiens
gggttttgccatgttgcccaggctgatcttgaactcctgggctcaagccatcctccgcctcggcctcccaaagtgccgggataacaggtgtgagtcacagygcctggcttatttcttttcttttctttctttcttttcttttcttttctttttttttttttatgagacggagtctcgctctgtcacccaggctggagtgca

SEQ ID NO: 51980 - DNA, 201 bp, Homo sapiens
tccaggcactgaaggaggcgtccgagagtgctcggcaggacttccagcgtgaggctgagctgctcaccatgctgcagcaccagcacatcgtgcgcttcttyggcgtctgcaccgagggccgccccctgctcatggtctttgagtatatgcggcacggggacctcaaccgcttcctccggtaccagcacctggcctcagcgc

SEQ ID NO: 51981 - DNA, 201 bp, Homo sapiens
attgggcctccctccctccatagaaagatggagacagacacacaaactctacccctccctgcctcagctcccttcgaatggcttcaggacttgagtctcartttaggtgtccctacctctaggaagccttccctggctttttccattcccacccgtggtgcctgccaggtgcccctcacactgcactgccatgacctgctt

SEQ ID NO: 51982 - DNA, 201 bp, Homo sapiens
tgggggagaccagaaggtcagggagggctcaagcatccgagggcctgggaggacctgagaggctgagcactgagggactgggagaagtcaggaagctcagrgctttgaggggtctagagtagttgaggaaacaatgaggggcctgaggaggggtaggggttcagcacaggggactgggaggctgggatgggcagggagggc

SEQ ID NO: 51983 - DNA, 201 bp, Homo sapiens
catcctgttactggagtcagagagaaagacctctgtgtcctccctttcacctgtagacggtcctccctgctgcctaactgctccctcttatcccctgtgayccctcaggccctttccttgactctgttggtgtcccccatgccccccagggtcctgtcggggaaccctctgcactgttcttgtgccctgcgctggctacag

SEQ ID NO: 51984 - DNA, 201 bp, Homo sapiens
cctggggaacgggcactggcaaaggctgggggaaactgcctggggtgacatcgcctgggctccaggtcattgaggagggtgggggaaggagcagccccgcrgtagagttctggggccactcccagctctaacaccccttggccctcgggcgtcctgggtggccaggtgtgcccacgctgaaggtccaggtgcccaatgcct

SEQ ID NO: 51985 - DNA, 201 bp, Homo sapiens
atgccagctgtggtaggtgccgggtgagggaggtggtgtaagggggctggggaagagacctacctgcctgagggagagggcactgagcaagcactgaaaargcctggggaacgggcactggcaaaggctgggggaaactgcctggggtgacatcgcctgggctccaggtcattgaggagggtgggggaaggagcagccccg

SEQ ID NO: 51986 - DNA, 201 bp, Homo sapiens
cctctcccatcacacgcggctgctggggatcgccttcctcaggctcctgggagttctatcctcccagcctatcccctctccttttcttgttcacagatccyatggacctgatgccaagctgctggctggtggggaggatgtggctccaggccccctgggtctggggcagctgctggctgtggctagccaggtcgctgcggg

SEQ ID NO: 51987 - DNA, 201 bp, Homo sapiens
gagttctatcctcccagcctatcccctctccttttcttgttcacagatcccatggacctgatgccaagctgctggctggtggggaggatgtggctccaggycccctgggtctggggcagctgctggctgtggctagccaggtcgctgcggggatggtgtacctggcgggtctgcattttgtgcaccgggacctggccacac

SEQ ID NO: 51988 - DNA, 201 bp, Homo sapiens
tcgagaacccacaatacttcagtgatgcctgtgaggggctatgctgggtcaagggcagggacgagtgtgtgtgtgtgtgtgtgtgtgtgtgtgtgtgtgtrgaagcccctaggcctgaacgatccctccctttctcccacccctccccagccctattccagccataggccctgtcatattcttctcaggctgagtccagcc

SEQ ID NO: 51989 - DNA, 201 bp, Homo sapiens
cagggtcctgtcggggaaccctctgcactgttcttgtgccctgcgctggctacagcgctgggaggaggagggactgggcggagtgcctgaacagaagctgyagtgtcatgggcaagggcccctggcccacatgcccaatgccagctgtggtaggtgccgggtgagggaggtggtgtaagggggctggggaagagacctacc

SEQ ID NO: 51990 - DNA, 201 bp, Homo sapiens
gcaccagcacatcgtgcgcttcttcggcgtctgcaccgagggccgccccctgctcatggtctttgagtatatgcggcacggggacctcaaccgcttcctcyggtaccagcacctggcctcagcgctggccccggcccctggctctgggccccgtcttcccttccctatagacatccctgcttgtctttcaaaccaagggga

SEQ ID NO: 51991 - DNA, 201 bp, Homo sapiens
caggcgtgaaccaccgagcttgtgtatttatttttaatgatggggctggggtaggctgtgccttgacgggctgtcccaggcgcccctggaattgatgcagygtccgcccgtggcaggtgggaggccgcaccatgctgcccattcgctggatgccgcccgagagcatcctgtaccgtaagttcaccaccgagagcgacgtgt

SEQ ID NO: 51992 - DNA, 201 bp, Homo sapiens
ggcgcgatcttgactcaccgcaacctccgcctctcgggttcaagcgattctgcgattctcctgcctcagcctcccgagtagctgggagtacaggcacgcgycaccatgcccagctaatttttgtatttttagtagagacagggtttcactacgttggccacgctggtctcaaactcctgacctcgtgatccacccacctcg

SEQ ID NO: 51993 - DNA, 201 bp, Homo sapiens
tgccgggataacaggtgtgagtcacagcgcctggcttatttcttttcttttctttctttcttttcttttcttttctttttttttttttatgagacggagtytcgctctgtcacccaggctggagtgcagtggcacaatctcatctcggctcactgcaagctccgcctcctgggttcacgccattctcctgcctcagcctcc

SEQ ID NO: 51994 - DNA, 201 bp, Homo sapiens
tattttttctttttgtagagttggggttttgccatgttgcccaggctgatcttgaactcctgggctcaagccatcctccgcctcggcctcccaaagtgccrggataacaggtgtgagtcacagcgcctggcttatttcttttcttttctttctttcttttcttttcttttctttttttttttttatgagacggagtctcgc

SEQ ID NO: 51995 - DNA, 201 bp, Homo sapiens
tgagcagattacaggcccactgtgtgtccaaggcacatctgcccacattcccagggcaccctgcacaggggtgagtggggcagcaggggtccatgtgtacstggtgggcacttaaagcctctgggtcactctggggggctgtgcccttccctccttgtcaccatgctgagagcccttgcctggtttctcatcctggggagc

SEQ ID NO: 51996 - DNA, 201 bp, Homo sapiens
tgggcagtatctagcctgggggacaggccctggggtgttgaggaagagcagtcttcccccaaaaccagccttcctccctgtagggattgggccctaagagsggggacacaggacagggccctggaggcaggagctcaggacccagtctagctttacccttagttctcagagctgcagtttcctgtcggcaacattgcctcc

SEQ ID NO: 51997 - DNA, 201 bp, Homo sapiens
catgtgcatgtgtgacttgaggtgcgtctctgtgcacatgtatgcatttgtgtgtgcacgcctgtgtaagtgtgtatgcaggtctgaacaggtgcatatgygtgtgcatgtggcatgtgcatgtgtattgtgagggagtaagtgggtgggcatgggaactcaagtgtgggcctgagccctgtgactcccatccgctctccc

SEQ ID NO: 51998 - DNA, 201 bp, Homo sapiens
gacactgctggggggtctctttggggactatgtgcatgccagtgaaacccccatcaaagcaggggctgcaggactacccgttaagggggctactgccctgrggagctggcctggatgactgtgtgtgtgctgggcctggctgagcagattacaggcccactgtgtgtccaaggcacatctgcccacattcccagggcaccc

SEQ ID NO: 51999 - DNA, 201 bp, Homo sapiens
gacagagagggtcatgggatgggcaggagagactatcagagtccctggcagcccctccctggccttctgagggcaggagttcagctcccctgtcccccaayatgagcaggcagagagatgggaaggatggtggggctgacactcatggagttatgcagggtcctctaaactctgctgtgtccagcaatttaacaaagcaaa

SEQ ID NO: 52000 - DNA, 201 bp, Homo sapiens
cctttccttgactctgttggtgtcccccatgccccccagggtcctgtcggggaaccctctgcactgttcttgtgccctgcgctggctacagcgctgggagkaggagggactgggcggagtgcctgaacagaagctgcagtgtcatgggcaagggcccctggcccacatgcccaatgccagctgtggtaggtgccgggtgag

SEQ ID NO: 52001 - DNA, 201 bp, Homo sapiens
cctgtagagcagtggaccccaacttttttggcaccagagactggtttcatggaagacaattttaccacggatggtgcgggaggagaggatgatttcaggaygaaactgttccacctcagattatgaggcattagttagattctcaaaaggagcacacaacctagatccctcacgtgcgcagtagttcacagaatctaatgc

SEQ ID NO: 52002 - DNA, 201 bp, Homo sapiens
taacaccccttggccctcgggcgtcctgggtggccaggtgtgcccacgctgaaggtccaggtgcccaatgcctcggtggatgtgggggacgacgtgctgcygcggtgccaggtggaggggcggggcctggagcaggccggctggatcctcacagagctggagcagtcagccacggtgatggtgagaagaccttcgctggca

SEQ ID NO: 52003 - DNA, 201 bp, Homo sapiens
ccatctccctgtcccattctgtccaagggagtaggtgaggtctcccctgtcctctgtcccttggaacatgactggccttaactgagtggtctgaggctctstcagcagcactgagactgggccccatcatgtcagggcacctgggccctgtcttcaccttccctaacccaaaggcttgcattccacccagagccagggagg

SEQ ID NO: 52004 - DNA, 201 bp, Homo sapiens
ccaggcactgaaggaggcgtccgagagtgctcggcaggacttccagcgtgaggctgagctgctcaccatgctgcagcaccagcacatcgtgcgcttcttcsgcgtctgcaccgagggccgccccctgctcatggtctttgagtatatgcggcacggggacctcaaccgcttcctccggtaccagcacctggcctcagcgct

SEQ ID NO: 52005 - DNA, 201 bp, Homo sapiens
atgggagtggtagggggagtggacaggccagaactggggactagcaagcatgtagggtggtgagctgagatgtccccctgggtggggctgcagcctgacayccccctccccactgcctgcacagccccctccctcctcactcacccgcagagctaacgaggagataatggactcgaatagacagattgattatgaatccaa

SEQ ID NO: 52006 - DNA, 201 bp, Homo sapiens; identical to SEQ ID NO: 9086

SEQ ID NO: 52007 - DNA, 201 bp, Homo sapiens
gtcttcaccttccctaacccaaaggcttgcattccacccagagccagggaggagcagcttccccgccaccctcagccctatcacttccaatcacctgtccmgttcctgcaataatgcaagcttcccatggctcctcagggctaatcacatggctgtctcatgtccctgggtgccagtcccaccccacccccactcccatga

SEQ ID NO: 52008 - DNA, 201 bp, Homo sapiens
cgcggactcgctgcttgtttgctggtcaggcaggacgagcacggcggaaggctggcaccacgcagccttcggcgctgcccgggcgttcctccgcagccgcsgctgccctagcaagctttatggtcagtgcctggatgtcccctagtgttcagggcagctgggccgccggcttcagggagatcgaagggggaaatctccgtg

SEQ ID NO: 52009 - DNA, 201 bp, Homo sapiens
agactggggctaccgtctgaccctgcaagccccctcaggtgttcaccacatcaagcgccgggacatcgtgctcaagtgggagctgggggagggcgcctttsggaaggtcttccttgctgagtgccacaacctcctgcctgagcaggacaagatgctggtggctgtcaaggtgagaccctgccccggggggtactgctggcc

SEQ ID NO: 52010 - DNA, 201 bp, Homo sapiens
cgaccccttccctttctctgccccgtctgtgtcttcctccccaggttctgcgattgatcctttggtagtccttttcgttttcttcctagagttcggagaaygttctacctaacttactccaagtgacatgctcactcccctaggcacgcgcgccgcgaggatggagcgctgagcctggggctggctaggatgacctggaca

SEQ ID NO: 52011 - DNA, 201 bp, Homo sapiens
tcggcaggacttccagcgtgaggctgagctgctcaccatgctgcagcaccagcacatcgtgcgcttcttcggcgtctgcaccgagggccgccccctgctcrtggtctttgagtatatgcggcacggggacctcaaccgcttcctccggtaccagcacctggcctcagcgctggccccggcccctggctctgggccccgtct

SEQ ID NO: 52012 - DNA, 201 bp, Homo sapiens; identical to SEQ ID NO: 9091

SEQ ID NO: 52013 - DNA, 201 bp, Homo sapiens
ccccctgggtctggggcagctgctggctgtggctagccaggtcgctgcggggatggtgtacctggcgggtctgcattttgtgcaccgggacctggccacaygcaactgtctagtgggccagggactggtggtcaagattggtgattttggcatgagcagggatatctacagcaccgactattaccgtgtaagggtcctttg

SEQ ID NO: 52014 - DNA, 201 bp, Homo sapiens
gccagacccaaggttgagtgtggaggaggataggcacagaggagcccaagaaggccagggaggagcctatctctttgctcccagacatggcataggctcaktgctggtcttggggacacaggctagggagataccagcatctggggcccaggctgtgggagacgaggctctaactgctggatggaacactgggggaatcaa

SEQ ID NO: 52015 - DNA, 201 bp, Homo sapiens
caggtgggaggccgcaccatgctgcccattcgctggatgccgcccgagagcatcctgtaccgtaagttcaccaccgagagcgacgtgtggagcttcggcgyggtgctctgggagatcttcacctacggcaagcagccctggtaccagctctccaacacggaggtcagccccggcccatggtcaccccttgctggcctcccc

SEQ ID NO: 52016 - DNA, 201 bp, Homo sapiens
ccgcgcctggcccagattgggtctatttcaaacgcatatcttttttcaaaaagagtgtgtgtgtgtgtgtgtgtgtgtgtgtgtgtgtgtgtgtgtgtgtgtttgaagagatggggtctcagcctgttgcccaggctggaatgctttgggatcataactcactgcagccttgaactcctggcctcaagcgatcctcccacc

SEQ ID NO: 52017 - DNA, 201 bp, Homo sapiens
taagaccccgtcgctacaaaaataaaacataaaataaaaaaaaaatgtgatccaggagatagtcaacgaacaaacctaaaggaggaaggccattctctgcyacattctctcccacccctctctcccttctcttccctcccagccctcctctcctttccatctggagccagaggggctctccaaagacttcagccccagccc

SEQ ID NO: 52018 - DNA, 201 bp, Homo sapiens
gaggcgttctgctgcggcccctcagcgtctgccggagctgaggcggatcctcggggagaaggctgacgctgggggcccctaacaggggagggggcagaggkgggggcgtcagagagtaggaagcgggtggagaagaggggcaaggcggggccgggcgggggccgctggctccgccctttcctggcggctgggtctttaaca

SEQ ID NO: 52019 - DNA, 201 bp, Homo sapiens
atggacaatggatgtctggatcccaagttcactccttccttggggacctgggtgtgtctcgcttcttcactagggcccaagccccacttccctttctctcyctggactctcttgctcccaagaggaccttccgtggctccccactgcagaagattcaagtctgaatgtttcagcctgacattcagctcctgctaacgtctc

SEQ ID NO: 52020 - DNA, 201 bp, Homo sapiens
gcctccgcctccatcatggctgccttcatggacaaccctttcgagttcaaccccgaggaccccatccctggtgcgagggccatcctgaaccctgcccccaytcctgggctcctcctgggttacagccaacttcctgctatagccctgaccccagaaattggagtgcctggttcgggacagaaaggagtctggagtcctggt

SEQ ID NO: 52021 - DNA, 201 bp, Homo sapiens
ttctctcctccctcctgctgcagtctccttctcgccggtgggtgagtagcccaaggtggagggcaggttctgcctggtctctggagctgaggctggggcaragggtacagctgaactgatccctgagagaccagctggggccagggttggggggttactggaggctacagtgtgtgtcaaggctcacccctcctgccctgt

SEQ ID NO: 52022 - DNA, 201 bp, Homo sapiens
ctccttttcttgttcacagatcccatggacctgatgccaagctgctggctggtggggaggatgtggctccaggccccctgggtctggggcagctgctggcygtggctagccaggtcgctgcggggatggtgtacctggcgggtctgcattttgtgcaccgggacctggccacacgcaactgtctagtgggccagggactgg

SEQ ID NO: 52023 - DNA, 201 bp, Homo sapiens
tctacttccagggtgcctgcctgtgggcctgcccgccaggcacctaccagtatgagtcctggcgctgtgtcacagctgagcgctgtgccagcctgcactcygtgcccggccgtgcctccaccttcggcatacaccagggcagttgcctggcccagtgcccttctggcttcacccgtaatagcagcaggtgagtgtagggag

SEQ ID NO: 52024 - DNA, 201 bp, Homo sapiens; identical to SEQ ID NO: 9130

SEQ ID NO: 52025 - DNA, 201 bp, Homo sapiens
tgcttgagccctccctgaccttctggtctcccccaggcccatgctgagctccacacccacagtccccgtttccctcacaggtttctcagctcccccaggcycctcagatcacggagctccagatgctgcagatgctgctggttctcgatgtagctgtggggagagcggatgggagtcacagggctcaggcccacacttgag

SEQ ID NO: 52026 - DNA, 201 bp, Homo sapiens
tcacaccagagtggagtgggcacgagtctgcgtgaggccgtctctatgacaacaactaccctgttatccccacagggccagggtgggcagcaaggaccacmtgtgtggagccccacccctcccctgccctgcattggtgactgaagcaacagtgacccctaatggttaccagcagaaccgcagctaagggaaaaagttggg

SEQ ID NO: 52027 - DNA, 201 bp, Homo sapiens
tgaagaaattaatagatcttctcttagctcctcggacgcaggagccgcccgcgggtggagctgaggaccgcgcaccttggaggccgagcacctggaaagcyccgggatccccagcacccagggcagcagaaggctggtcccaacccctcccaccgcgcaagcctccgtggctgcactaacccatccgtctcaagctgggga

SEQ ID NO: 52028 - DNA, 201 bp, Homo sapiens
gggagcaagagagtccagggagagaaagggaagtggggcttgggccctagtgaagaagcgagacacacccaggtccccaaggaaggagtgaacttgggatmcagacatccattgtccatggttcctgagtgcccagtggttccagccctggactgggcacaactgggggaaagcagagctgactaacaagggtcccaccct

SEQ ID NO: 52029 - DNA, 201 bp, Homo sapiens
gagagtccagggagagaaagggaagtggggcttgggccctagtgaagaagcgagacacacccaggtccccaaggaaggagtgaacttgggatccagacatycattgtccatggttcctgagtgcccagtggttccagccctggactgggcacaactgggggaaagcagagctgactaacaagggtcccaccctccttggag

SEQ ID NO: 52030 - DNA, 201 bp, Homo sapiens
ggaggccgaggcagagggattacttgaagaggccaggagttcaagtatgcagcaaactatgatcctcccactacactctagcctgggcaacagagtgagamcatgtctcaaaatattatacacatacaaacacacacacacacacacacgcacattagtcagtgttaagaattatagagaaaaataaagcagaagggggag

SEQ ID NO: 52031 - DNA, 201 bp, Homo sapiens
gttaagaattatagagaaaaataaagcagaagggggagtagaaagtgtcacaattttatttattttattataattatttttagacagggtctcactctgtygcccaggctggagtgcagtggcgtgatcacggctcactgcagccttgaccttctgggctcaagcgatcctcccacctcaacctcctgagtagctgagact

SEQ ID NO: 52032 - DNA, 201 bp, Homo sapiens
atagagaaaaataaagcagaagggggagtagaaagtgtcacaattttatttattttattataattatttttagacagggtctcactctgtcgcccaggctrgagtgcagtggcgtgatcacggctcactgcagccttgaccttctgggctcaagcgatcctcccacctcaacctcctgagtagctgagactataggtgtgc

SEQ ID NO: 52033 - DNA, 201 bp, Homo sapiens
ggctaatataacattacttacttctcaggactgttttgaatattactcaagttgttatgtgtaaagcacataaaacaatgcctggaacacagtatatacartataaattacagtcacatataactctataacagttggctataattgtcatcatctggtcctgtcagctgcagagcaagactgcctgggtttgaaacccat

SEQ ID NO: 52034 - DNA, 201 bp, Homo sapiens
aaagccctgagcttcctgacttctcccagtccctcagtgctcagcctctcaggtcctcccaggccctcggatgcttgagccctccctgaccttctggtctmccccaggcccatgctgagctccacacccacagtccccgtttccctcacaggtttctcagctcccccaggcccctcagatcacggagctccagatgctgca

SEQ ID NO: 52035 - DNA, 201 bp, Homo sapiens
agcctagggcctgagttacagagagggactccatctcaaaaaaaaaaaaaaaaaaaaaaaaaaaaaaagaatgttttaaattaccatccaggtcgggcackgtggctcctgcctgtaatctctgcactttgggagggcaaggcaggaggatcaccatgcggtcaggagttcaagaccagcctggccaacatggagaaaacc

SEQ ID NO: 52036 - DNA, 201 bp, Homo sapiens
cccctcattgtttcctcaactactctagacccctcaaagccctgagcttcctgacttctcccagtccctcagtgctcagcctctcaggtcctcccaggccytcggatgcttgagccctccctgaccttctggtctcccccaggcccatgctgagctccacacccacagtccccgtttccctcacaggtttctcagctcccc

SEQ ID NO: 52037 - DNA, 201 bp, Homo sapiens
actgtcatctcccccagggagccctcttctacccctaaagccagtgatgcttccccaagccctgccccgaaactggccttcaggcagccagcactagttgyctctggccccttaatttccctgtggcagtgggtcttggccttttagggtcatggacatgtttgagaagctgttgaagctaggaacactctctctagaaaa

SEQ ID NO: 52038 - DNA, 201 bp, Homo sapiens
tattctttgggagaacaaggctgttggaccccagaaaggagggctcattactagatagtattcaggaggaagacccacacccctgagttgcatccttctcrcactcctagctcccacggtgccccaagacgtcatctccacgtccaactcctcctcccacctcctggtgcgctggaagccaccgacccagcgcaatgggaa

SEQ ID NO: 52039 - DNA, 201 bp, Homo sapiens
cccaaggcggcatcatggaataggtgaaggacaggttcaaggtgggcatggggggaaaagaataggcatgaacagagagtaggcagcgcaagaagcagtgyggggcagtggctaagtccaaagccagaggacctgggttcaagtctcagctctaccacttactggctatgttcacttagcctctctgtgccacagtttcct

SEQ ID NO: 52040 - DNA, 201 bp, Homo sapiens
tggctgaagatgataaaaaggatgaaatcagagaggctacaagggctcaaactgtgcagggccctgtaggctgtagtaagatcaagagagatggaagtcayggggggttataagcagaggagaaacgtgatccatctgtgttttgagatcactctggctgcagagtggagaatggcccatagagggacaagggtggaactg

SEQ ID NO: 52041 - DNA, 201 bp, Homo sapiens
gcttctgtgaatccagagtacttcagcgcctctgatagtaggtctgggagtgggtggacaggtggtgtgggaaagggagacaggagaggagcagagacagmcttccagaagaccttcttgcagaagatagccttgggacaagagcccttcagaagaggagaagagaagttggggggtgaggtgtggcagagagcagcatcc

SEQ ID NO: 52042 - DNA, 201 bp, Homo sapiens
tccttctgcgctggctcgagccaccagaccccaacggactcatcctcaagtacgaaatcaagtaccgccgcttgggagaggtaggtgcccgtgggaccccygtcccagccccgttttgtgcctacatcgccttcccagccagctgttctgcgttactctcaggaggccacagtgctgtgtgtgtcccgtcttcgatatgcg

SEQ ID NO: 52043 - DNA, 201 bp, Homo sapiens
gacctgctcagcttcatcgtgtactacaaggagtcgtgagtgccgggggcggggccggagcgggggcgggaccggacgaggccaatttcttcgggaccacrggcaggtgagggcggagctcagcgaggctatgaagacccaggaagccaggacccgcaagttgtactccgtggtagggcccaggtctggctctcttccctc

SEQ ID NO: 52044 - DNA, 201 bp, Homo sapiens
ggctatgactgtcaatccaggggaagatgatggtggaagctgtgaaggtgttgacaagcagttcagatcctggacatattttaaagataaacccacaggaygtacaaggtgaaaaagaaaggtgttaagggtgactgcaagaatgaagtcgctgggagtcgcttgcagtcgttgggagcctgactgcaagaatgaagtcgc

SEQ ID NO: 52045 - DNA, 201 bp, Homo sapiens
tcacaggacacctgctcccatgacacccactatgagcccccacccccccaacctgctcctggactatcctgcttataggtcccaacaaaggcaggcacttyccgctgggccacaagttcccccactgccacccaatttgacctccctcaagttttgtccctggctcagcatgaattccatcatccccttcccagtccaaag

SEQ ID NO: 52046 - DNA, 201 bp, Homo sapiens
cctccgtggctgcactaacccatccgtctcaagctggggagagcgaagggaagaggggtgtctcttggcggggagacaggcaaggccccagggagcggggraaggacgacctcctagaggctcacggttctctccgccaaggccccagcacggatggccccccaagtccccgagacagggacacacagaccgaccgagcag

SEQ ID NO: 52047 - DNA, 201 bp, Homo sapiens
gcacatcctaggaaacctctcagtccagccacactgggattgttggtcaccacactctcacaccacctgtcaggtgtgagagtttgtgcacccaagctgaraaataatagagctgtcccttattaggagaagaagcaggaggcctggggatgtgttccagaatgcctgatgtcagatccttccagggctgactgcaagagg

SEQ ID NO: 52048 - DNA, 201 bp, Homo sapiens
taatgacccgtggggacctcaagagccatcttcgatctttgcggcctgaggcagaggtagggaccaggaagaccctggggagtgaaagaagggttgggcasagtgtgggaggtgggggccagttctggacaggagaccagcctctgggttccttcctcaccagcccccaatcttggctctagaacaaccctgggctcccac

SEQ ID NO: 52049 - DNA, 201 bp, Homo sapiens
ccacgcctgcgcccatctttcacacacattctggacagcatacaggaggagctgcggccctccttccgcctcctctccttctactacagcccggaatgccsgggggcccggggctccctgcctaccaccgatgcagagcctgactcctcacccactccaagagactgcagccctcaaaatgggggtccagggcactgaggg

SEQ ID NO: 52050 - DNA, 201 bp, Homo sapiens
agccctggcatgactacagtgtgaatctcccccagctccccggcttgtgcacttcacaatctgcacaactatacacagctgtctctgggctcaaagagcasagaaccttgggaacccttcaacaagcttccctaacatcactgccctgcagcgtggctgcagctatgctccctcagagacacacactgcagatcctgccca

SEQ ID NO: 52051 - DNA, 201 bp, Homo sapiens
ccacatgactgccttgcttgccactggtttcacctcctcccctcagctccactgaccaggtggcatggggagaacccaggggcctggggagtggttcccarcctgcccgccctcacctcctcctctccttttgccctgcccagggctccccaagcttggtgctccttcctccttttctccaggggcatcccttggagtaca

SEQ ID NO: 52052 - DNA, 201 bp, Homo sapiens
gccctggatgcttaaggctttcagagcctcatcttcctccctcccctcaccctcacccagccccgcccccacccctgcctctcatgggaagactggagaargcacaataaatgctgaggcctgtttgtaccctggtcccaggcagcccattatctctccatctacatggtgttaacactggatgaacttcctttctccctc

SEQ ID NO: 52053 - DNA, 201 bp, Homo sapiens
aagcttcaaaaagggaaggattaggaggtatccccttccccagtcccaccattcccctccaaactgaagcagctcaggaatccagactctgtgcttgcccragaggtcctatgatgcccctcagactgggggctcccaggggcaggggagtctcctcttcccatggagatgggagagtgatgcaatgggctgggtaggagg

SEQ ID NO: 52054 - DNA, 201 bp, Homo sapiens
cttgctggccatgatagccatatgtaatattcaagtattttccagccatcaccatatgatgcctgagtacctccaggccagtcattaccgcatactcccakaggtttcaccagctgctaaaaagtacttgagtattttgtaaccaattcctgcagaatgtcagagtcctgcagaatgctgaagattcctcccagcttcgtg

SEQ ID NO: 52055 - DNA, 201 bp, Homo sapiens
tggtcccaggcagcccattatctctccatctacatggtgttaacactggatgaacttcctttctccctcctctgggactcgaggtggtgaccctaaggcaragacacgggataaatacactgctgtcaaacaccacctccatgaggacccgagcagccagggttgccatggcagtgaggcaggacaatcttgctattatct

SEQ ID NO: 52056 - DNA, 201 bp, Homo sapiens
taacactggatgaacttcctttctccctcctctgggactcgaggtggtgaccctaaggcagagacacgggataaatacactgctgtcaaacaccacctccmtgaggacccgagcagccagggttgccatggcagtgaggcaggacaatcttgctattatctcctgctcaggaccagaagtggttgagcccggcagggaacc

SEQ ID NO: 52057 - DNA, 201 bp, Homo sapiens
ggcttttctgccagtgccatgagggcatttgaaagggaagggttgcaaaagaatgacttcaaaccttgacgaagggggtggcagcgggaggggctgcccamggctcagaactctttagcttcctgcccccaggggcttggggcatagctgccatgccacacacatgccacacactctgggtctggcgagatgagactttct

SEQ ID NO: 52058 - DNA, 201 bp, Homo sapiens
cccaccatgaaagaggagggaggagggaggggcataagggaggcactcacagggtgaagataggactgaagttccaggaccaaaaagtgaggctggttcarggacagagggcattccttcttgcctctctccctaccctgtccttccacacagagggaggtagctgtcaatcaccaaggcctctagatgtcagagggagga

SEQ ID NO: 52059 - DNA, 201 bp, Homo sapiens
attccatcatccccttcccagtccaaagaaacaaattatcatgaacatcaatgtgatgttccattgtctcccatggtctgttctgctatctcccatggggkgcccactgtcatctcccccagggagccctcttctacccctaaagccagtgatgcttccccaagccctgccccgaaactggccttcaggcagccagcacta

SEQ ID NO: 52060 - DNA, 201 bp, Homo sapiens
gctatgactgtcaatccaggggaagatgatggtggaagctgtgaaggtgttgacaagcagttcagatcctggacatattttaaagataaacccacaggacrtacaaggtgaaaaagaaaggtgttaagggtgactgcaagaatgaagtcgctgggagtcgcttgcagtcgttgggagcctgactgcaagaatgaagtcgct

SEQ ID NO: 52061 - DNA, 201 bp, Homo sapiens
gccatgtagagggaagaggattctggccagaaggaacagaaggacaaagaccccaaggcagaagctttgctggcttgttatagtagtaaagctcctgttayatataaggaaaagcaaagaagtcaatgtggctgaagatgataaaaaggatgaaatcagagaggctacaagggctcaaactgtgcagggccctgtaggctg

SEQ ID NO: 52062 - DNA, 201 bp, Homo sapiens
accgttctccccagagtcaccgggaggagagccgggactggacacaagccagggctgggacaatggcagtgcctagtctgtggccctggggagcatgcctrcctgtgatcttcctctccttgggatttggcctggatacagtagagggtgagtccccagaactggctcccagacccctacctccctcccagccagctggga

SEQ ID NO: 52063 - DNA, 201 bp, Homo sapiens
agaggcagaacagtaaatgcagcgactgaaatacagaaacacccgtcttggtccccctcctcttccccagattcagacagaactccagaaaaaaaaaaaarcctgtagctggctgggagaagacaggtgagcataaaagaagggaatgtttaccatccatccctcaaaactgtccctgtggccttgtggcaggtcttccac

SEQ ID NO: 52064 - DNA, 201 bp, Homo sapiens
ttaaaatggagaggacttagctgaccactggctcagggtctggcttgggaggagaaaggaaggaagtcagttgtaggagacccactcaaatggccgagacyctcctaggtctcagtggtaggtgaaggtctccagcgtgggcagctggagagtttgttaaatacagattcctgggcctcgccccccactgattctgattca

SEQ ID NO: 52065 - DNA, 201 bp, Homo sapiens
ggtgcatcgcagtcccgaggagccgtgggggcagcaggcatcggggcagggtgcggcgcccgcagatgccagtatcagccaagccagcaggctgcccggcyccgcagcccagctgtgccagccaagctgcccgcgccgtccgcctcgcagcatcgcggcggcgcccgcctcgctcaggcggggcagccgtctgtgcgctcc

SEQ ID NO: 52066 - DNA, 201 bp, Homo sapiens
ctcagaaacgtccctatgcacagctgtggaagctctgaggacaccccgggactttttacccagccctgtccctttgatgtctgtgggtgtggcccccaacyctccccacttgtgtacaacagggggactttctgctcagtcatttctggagatgagacgggtcccatcctgagggcccactctggctcccagcctcccagg

SEQ ID NO: 52067 - DNA, 201 bp, Homo sapiens
tatgcacagctgtggaagctctgaggacaccccgggactttttacccagccctgtccctttgatgtctgtgggtgtggcccccaactctccccacttgtgwacaacagggggactttctgctcagtcatttctggagatgagacgggtcccatcctgagggcccactctggctcccagcctcccaggtgtgtcatcctgtg

SEQ ID NO: 52068 - DNA, 201 bp, Homo sapiens
aggacaccccgggactttttacccagccctgtccctttgatgtctgtgggtgtggcccccaactctccccacttgtgtacaacagggggactttctgctcmgtcatttctggagatgagacgggtcccatcctgagggcccactctggctcccagcctcccaggtgtgtcatcctgtgtcttaagcagaactggacaggag

SEQ ID NO: 52069 - DNA, 201 bp, Homo sapiens
gtctgtgggtgtggcccccaactctccccacttgtgtacaacagggggactttctgctcagtcatttctggagatgagacgggtcccatcctgagggcccrctctggctcccagcctcccaggtgtgtcatcctgtgtcttaagcagaactggacaggaggaggggggctgacagacacgcaggaggagacaggggaggac

SEQ ID NO: 52070 - DNA, 201 bp, Homo sapiens
gggcagcaggcatcggggcagggtgcggcgcccgcagatgccagtatcagccaagccagcaggctgcccggccccgcagcccagctgtgccagccaagctrcccgcgccgtccgcctcgcagcatcgcggcggcgcccgcctcgctcaggcggggcagccgtctgtgcgctcccagctgcagctgccaggcctcccccgac

SEQ ID NO: 52071 - DNA, 201 bp, Homo sapiens
tgtggatgttgcacaggagagccagctcccaggcttttctgccagtgccatgagggcatttgaaagggaagggttgcaaaagaatgacttcaaaccttgaygaagggggtggcagcgggaggggctgcccaaggctcagaactctttagcttcctgcccccaggggcttggggcatagctgccatgccacacacatgccac

SEQ ID NO: 52072 - DNA, 201 bp, Homo sapiens
ggagatgagacgggtcccatcctgagggcccactctggctcccagcctcccaggtgtgtcatcctgtgtcttaagcagaactggacaggaggaggggggckgacagacacgcaggaggagacaggggaggacagatgaagcagagaagacaagggtggcagccaggaggaaattctgagactatgaaaagggagtctcaag

SEQ ID NO: 52073 - DNA, 201 bp, Homo sapiens
acatacattattcatgcagggaaaaacaagcagtttgcttttaaaagaacgaggcttcctgcccagaggtctgggctcaggatgagtgcacagagccttayaggcgccctgctctgtcccctcgctacctgggtgtgtatcgcgggctctgtcacatacatactctccaaggacatttttttcctccatgttttaggctgg

SEQ ID NO: 52074 - DNA, 201 bp, Homo sapiens
ccaggccctcggatgcttgagccctccctgaccttctggtctcccccaggcccatgctgagctccacacccacagtccccgtttccctcacaggtttctcrgctcccccaggcccctcagatcacggagctccagatgctgcagatgctgctggttctcgatgtagctgtggggagagcggatgggagtcacagggctcag

SEQ ID NO: 52075 - DNA, 201 bp, Homo sapiens
agcagggtctgtgtgtctggcaccctgtggttatcctgggaggccagaatctcagtgttcatcgcacgtgtagagacaccattgaggcatgtggatgttgyacaggagagccagctcccaggcttttctgccagtgccatgagggcatttgaaagggaagggttgcaaaagaatgacttcaaaccttgacgaagggggtgg

SEQ ID NO: 52076 - DNA, 201 bp, Homo sapiens
acgggtcccatcctgagggcccactctggctcccagcctcccaggtgtgtcatcctgtgtcttaagcagaactggacaggaggaggggggctgacagacamgcaggaggagacaggggaggacagatgaagcagagaagacaagggtggcagccaggaggaaattctgagactatgaaaagggagtctcaagaaaatgaga

SEQ ID NO: 52077 - DNA, 201 bp, Homo sapiens
aggctgggacaaagtccattttattgaattcaggattggcagcatgtttttgtagccctaccgtgtcttccatcccaggagacataaaacaggtgggaagyagagaaaagcagacacttctcagagattcctagcaaccctaggcttaccccaagggaggccaatagctctctgtttacaggattttggggctataaaaag

SEQ ID NO: 52078 - DNA, 201 bp, Homo sapiens
tcacctcctcccctcagctccactgaccaggtggcatggggagaacccaggggcctggggagtggttcccagcctgcccgccctcacctcctcctctcctyttgccctgcccagggctccccaagcttggtgctccttcctccttttctccaggggcatcccttggagtacagtcaccctttcttcagtccctcccctcaa

SEQ ID NO: 52079 - DNA, 201 bp, Homo sapiens
ctgagggcccactctggctcccagcctcccaggtgtgtcatcctgtgtcttaagcagaactggacaggaggaggggggctgacagacacgcaggaggagamaggggaggacagatgaagcagagaagacaagggtggcagccaggaggaaattctgagactatgaaaagggagtctcaagaaaatgagacaaaaaggacag

SEQ ID NO: 52080 - DNA, 201 bp, Homo sapiens
gtctcaagaaaatgagacaaaaaggacagaagttgtcagcaggttcagacaagaaacggagagggagaaggggcctggctagcaaccctccctagatggckgcaacttctggggcatgggaggcacaggtgtgaaggaggcaggggtacctcttttggaagcagaatttcctaggggagagaccttaatgctggaaggcca

SEQ ID NO: 52081 - DNA, 201 bp, Homo sapiens
acaggtgtgaaggaggcaggggtacctcttttggaagcagaatttcctaggggagagaccttaatgctggaaggccaagagctgaaataagataatggatrcccagtgctttgtaagctataaagcactatacaaattattgtcgttgttatctggttgtgatatcatttacaaagatactgcagaagtacatttagtgac

SEQ ID NO: 52082 - DNA, 201 bp, Homo sapiens
cacacttacacaggcgtgcacacacaaatgcatacatgtgcacagagacgcacctcaagtcacacatgcacatgtgtgtgcatgaacacacaagcgcacayacatatggatccccacaccctcacacatatgcacattctcacatacctcttgcacacatgcacacacctaggtatgcacatgcgcacacacagaggcata

SEQ ID NO: 52083 - DNA, 201 bp, Homo sapiens
gggagagcggatgggagtcacagggctcaggcccacacttgagttcccatgcccacccacttactccctcacaatacacatgcacatgccacatgcacacrcatatgcacctgttcagacctgcatacacacttacacaggcgtgcacacacaaatgcatacatgtgcacagagacgcacctcaagtcacacatgcacatg

SEQ ID NO: 52084 - DNA, 201 bp, Homo sapiens
ggaggcaatgttgccgacaggaaactgcagctctgagaactaagggtaaagctagactgggtcctgagctcctgcctccagggccctgtcctgtgtccccsctcttagggcccaatccctacagggaggaaggctggttttgggggaagactgctcttcctcaacaccccagggcctgtcccccaggctagatactgccca

SEQ ID NO: 52085 - DNA, 201 bp, Homo sapiens
ttggattcataatcaatctgtctattcgagtccattatctcctcgttagctctgcgggtgagtgaggagggagggggctgtgcaggcagtggggagggggrtgtcaggctgcagccccacccagggggacatctcagctcaccaccctacatgcttgctagtccccagttctggcctgtccactccccctaccactcccat

SEQ ID NO: 52086 - DNA, 201 bp, Homo sapiens
cacggagatttcccccttcgatctccctgaagccggcggcccagctgccctgaacactaggggacatccaggcactgaccataaagcttgctagggcagcsgcggctgcggaggaacgcccgggcagcgccgaaggctgcgtggtgccagccttccgccgtgctcgtcctgcctgaccagcaaacaagcagcgagtccgcg

SEQ ID NO: 52087 - DNA, 201 bp, Homo sapiens
tgtccaggtcatcctagccagccccaggctcagcgctccatcctcgcggcgcgcgtgcctaggggagtgagcatgtcacttggagtaagttaggtagaacrttctccgaactctaggaagaaaacgaaaaggactaccaaaggatcaatcgcagaacctggggaggaagacacagacggggcagagaaagggaaggggtcg

SEQ ID NO: 52088 - DNA, 201 bp, Homo sapiens
cccacagtgtgcccctgcccccatgggatggcttgcacagcgaggggcgagtgctgccacaccgaatgcctggggggctgcagccagccagaagaccctcrtgcctgtgtagcttgccgccacctctacttccagggtgcctgcctgtgggcctgcccgccaggcacctaccagtatgagtcctggcgctgtgtcacagct

SEQ ID NO: 52089 - DNA, 201 bp, Homo sapiens
ggttcagacaagaaacggagagggagaaggggcctggctagcaaccctccctagatggcggcaacttctggggcatgggaggcacaggtgtgaaggaggcmggggtacctcttttggaagcagaatttcctaggggagagaccttaatgctggaaggccaagagctgaaataagataatggatgcccagtgctttgtaagc

SEQ ID NO: 52090 - DNA, 201 bp, Homo sapiens
tgttaaagacccagccgccaggaaagggcggagccagcggcccccgcccggccccgccttgcccctcttctccacccgcttcctactctctgacgcccccmcctctgccccctcccctgttaggggcccccagcgtcagccttctccccgaggatccgcctcagctccggcagacgctgaggggccgcagcagaacgcctc

SEQ ID NO: 52091 - DNA, 201 bp, Homo sapiens
ggaggaggggggctgacagacacgcaggaggagacaggggaggacagatgaagcagagaagacaagggtggcagccaggaggaaattctgagactatgaaragggagtctcaagaaaatgagacaaaaaggacagaagttgtcagcaggttcagacaagaaacggagagggagaaggggcctggctagcaaccctccctag

SEQ ID NO: 52092 - DNA, 201 bp, Homo sapiens
gagacgttagcaggagctgaatgtcaggctgaaacattcagacttgaatcttctgcagtggggagccacggaaggtcctcttgggagcaagagagtccagrgagagaaagggaagtggggcttgggccctagtgaagaagcgagacacacccaggtccccaaggaaggagtgaacttgggatccagacatccattgtccat

SEQ ID NO: 52093 - DNA, 201 bp, Homo sapiens
ggagaattgtttgaacccagaaggtagagattacagtgagccgaaatcgtgccactgcactccagcctagggcctgagttacagagagggactccatctcaaaaaaaaaaaaaaaaaaaaaaaaaaaaaaagaatgttttaaattaccatccaggtcgggcacggtggctcctgcctgtaatctctgcactttgggagggc

SEQ ID NO: 52094 - DNA, 201 bp, Homo sapiens
ggtttgacttctcgctaaccccagagcctcgctttgcttgcccctctcagttcccataatcccaaagctttccccacctcccagctcagcccagtttagcytgggtttgaacataaggtgagatgaaccacttttggcccggctgctggatgccccttcccgcaggagaggctgatggtattccaggaaaggtggcctggg

SEQ ID NO: 52095 - DNA, 201 bp, Homo sapiens
cccagatccccttggaaggtgacgtccatcaacaagagcccccaaaggtgagcaggactagggcaggtgctgaggggcgtggctttgggggctgggccttsgctctgactcgctctccccagggactcagggcggcaccgccgggcagctgggcccctccggctggggggcaacagctcggatttcgagatccaggaggac

SEQ ID NO: 52096 - DNA, 201 bp, Homo sapiens; identical to SEQ ID NO: 9141

SEQ ID NO: 52097 - DNA, 201 bp, Homo sapiens
tagaataggaactggatatatttactgaatccgctacaacctactacaataattacttttaataaaattaacattgaattatcaagaaaatgctaaatgaygttcaacaaactgcttaagagaaacatttgcaatacattgtagaaaaatctgtataatggttaaaaataattttcataaaaaaagtttgaccccccacta

SEQ ID NO: 52098 - DNA, 201 bp, Homo sapiens
aaggctagagaacacacccagactacatctttgtggcggagaggtatactgagactgaactaaaggcatgtgatcccacaggaaccctggacgtaaaacartaattaggtgtttaagtatataaacccaacagcattgttttcacatcacaaatgattcaaatgagacttgacttcaaagtacaaattaccaaataggcat

SEQ ID NO: 52099 - DNA, 201 bp, Homo sapiens
gcgccctactccttggtgagcccattagtcccttacccagaacctattaagtttactttagacagaattgtgacaagtgaggctatctggattcccagtcygcactagactggaagttaccaatcagaagatgaggagaatgttagtggcagctatgctagtaacagtaaggacaatagattgtcagttagtgaaggggga

SEQ ID NO: 52100 - DNA, 201 bp, Homo sapiens
gaagatcatgtatatctgggtagtgggtgtaaatttagttcacagaaagaaatggtaaaaggttaaaggaggaaatgagtttcatagaatcagcagcatargcaaagatgaattctgtaatcatacatagaccctgaacatttgggctgactgtggttttatgtatttaaatgctgagatgttggtgacacggagtagtag

SEQ ID NO: 52101 - DNA, 201 bp, Homo sapiens
ttttgaaccctactagttttcttttaccaaaaggccatccatcctgtgatttgtatgatcactcggacagaagggaacatgtgctcccatctactttctcmtagtggttgatgaatgccattcacactgcctttatttttcatagcgtttcattcatcgctgcagcaaaattataaacttctagatggagggggttgtatc

SEQ ID NO: 52102 - DNA, 201 bp, Homo sapiens
aaatcaattagccagtgtttagggggcatgttgaatgacagatacatatctttaaactaaaaaatcaaaatctgtaacagtagattcatatcttccatctyattccagcttctattatactaggtagaattttacttttaggggaagtgtgtttttcttttttcaaaagcatggctggcttaattgaatgtgataaattgc

SEQ ID NO: 52103 - DNA, 201 bp, Homo sapiens
ccctacaaaaatcaaaagttagtcaggcatggtggtgtgtgcctgtggtcccagctgctcaggatgctgaggtaggaggatcgcttgatcctggggagtcrgaggttgtgctgagctgagatggcgctgctgcattccaacctgggtgacagagcaagactctgtctcaaaaaaaaaaaaaaaaatcaaatgaactactaa

SEQ ID NO: 52104 - DNA, 201 bp, Homo sapiens
tgtctgctgggcacagggatgggtagctggaagtccccaaatgtgaatgagagggatatggaccctgtgcctgtactgcttgcattctacagtgggatackgacaagcaaaaacccactaacaaaacggtttttgaaaatgctatagaggagagatttagagaacacaccaaaggctacagaaccaaaggctagagaacac

SEQ ID NO: 52105 - DNA, 201 bp, Homo sapiens
gtctgctgggcacagggatgggtagctggaagtccccaaatgtgaatgagagggatatggaccctgtgcctgtactgcttgcattctacagtgggatacggacaagcaaaaacccactaacaaaacggtttttgaaaatgctatagaggagagatttagagaacacaccaaaggctacagaaccaaaggctagagaacaca

SEQ ID NO: 52106 - DNA, 201 bp, Homo sapiens
tctgctgggcacagggatgggtagctggaagtccccaaatgtgaatgagagggatatggaccctgtgcctgtactgcttgcattctacagtgggatacggacaagcaaaaacccactaacaaaacggtttttgaaaatgctatagaggagagatttagagaacacaccaaaggctacagaaccaaaggctagagaacacac

SEQ ID NO: 52107 - DNA, 201 bp, Homo sapiens
cggagttccaataaatattaaactagaattctgctgggaatttgagtcatccgcttaagctactcctgggaccaagacaactctggttgacctgatgttgrtgtttattcagagctttggtggaaaggagcctctcacccttggacttctaattaacaaagtcattccttagtcacttgttaagtgatagagctactcctt

SEQ ID NO: 52108 - DNA, 201 bp, Homo sapiens
ctgctgggcacagggatgggtagctggaagtccccaaatgtgaatgagagggatatggaccctgtgcctgtactgcttgcattctacagtgggatacggacaagcaaaaacccactaacaaaacggtttttgaaaatgctatagaggagagatttagagaacacaccaaaggctacagaaccaaaggctagagaacacacc

SEQ ID NO: 52109 - DNA, 201 bp, Homo sapiens
ctgggcacagggatgggtagctggaagtccccaaatgtgaatgagagggatatggaccctgtgcctgtactgcttgcattctacagtgggatacggacaagcaaaaacccactaacaaaacggtttttgaaaatgctatagaggagagatttagagaacacaccaaaggctacagaaccaaaggctagagaacacacccag

SEQ ID NO: 52110 - DNA, 201 bp, Homo sapiens
gggcacagggatgggtagctggaagtccccaaatgtgaatgagagggatatggaccctgtgcctgtactgcttgcattctacagtgggatacggacaagcaaaaacccactaacaaaacggtttttgaaaatgctatagaggagagatttagagaacacaccaaaggctacagaaccaaaggctagagaacacacccagac

SEQ ID NO: 52111 - DNA, 201 bp, Homo sapiens
cacagggatgggtagctggaagtccccaaatgtgaatgagagggatatggaccctgtgcctgtactgcttgcattctacagtgggatacggacaagcaaawacccactaacaaaacggtttttgaaaatgctatagaggagagatttagagaacacaccaaaggctacagaaccaaaggctagagaacacacccagactac

SEQ ID NO: 52112 - DNA, 201 bp, Homo sapiens; identical to SEQ ID NO: 9163

SEQ ID NO: 52113 - DNA, 201 bp, Homo sapiens; identical to SEQ ID NO: 9167

SEQ ID NO: 52114 - DNA, 201 bp, Homo sapiens
ataatatgtatttggctcacaaaacctgggtttgttctaaccctagtgaatgaaactaggacacaatatcctcctctatgtacttatgatcgtatgattgmaatactgaaagtggattttgaagcaaatcaggcataacatgtattgaaggctttttttattagttgaatatttggacacctctttgaatatttaaagtaa

SEQ ID NO: 52115 - DNA, 201 bp, Homo sapiens
aactctaaagttgtttcttaggagttatttaaattttcccatctattaaaaaataagttacctattttctgattccattataatatgtatttggctcacaraacctgggtttgttctaaccctagtgaatgaaactaggacacaatatcctcctctatgtacttatgatcgtatgattgaaatactgaaagtggattttga

SEQ ID NO: 52116 - DNA, 201 bp, Homo sapiens
ccttatttgctagcttgattgttgtttatgtaagtatagtctgagtaactagcaccctactccagaaggcttattgtaatttgtgtattttctaatcgatsctgcctctacctaacaggaatagtctttggcgtcttttactatagattagttttgcctgttttaaactatataaagttggaaccatgtcgtatgaactca

SEQ ID NO: 52117 - DNA, 201 bp, Homo sapiens
cagcagattcttcttacgctagccactttttgaagactttcctaatctgtagcttacaacccatatcttttgccttaacccagagcgttatcatgtctcayctcagttattgctctagcatctacttgggcctgcttccccttcccagttgtgataatagccactattgctagagcaatcattctaaaatacaaatctgtt

SEQ ID NO: 52118 - DNA, 201 bp, Homo sapiens
ttgtttaaaggttaagtgaaatttgcaatacacaatacagccattacataacaggcacagaatacagtttcatgacttggatagttcttgttttttaagckcattagcaacttcatttccaaatgctatcaaattcttcaggatatgaaaacctacatataagaatggagtgcctcatcggctcatttgtcttatgtaata

SEQ ID NO: 52119 - DNA, 201 bp, Homo sapiens
atgctaaatgacgttcaacaaactgcttaagagaaacatttgcaatacattgtagaaaaatctgtataatggttaaaaataattttcataaaaaaagtttkaccccccactaagggccaagctccaattatgctggtcatcattgaattgaaacggtttgctttgtatcaattctgaataaatgatgcactaaaaaacagc

SEQ ID NO: 52120 - DNA, 201 bp, Homo sapiens
atgtttgtccacttcaaggagcagttgtagcaaattcagaaccatagctcttcctggttgaaaagttacaactcttgactattaacagttcttaacatgattttttttttaattaccctatcttcactcacaacaattttgttaaagactatcctgtgctgataaactgctctctgaaatgcaaagaggaaattaacaatg

SEQ ID NO: 52121 - DNA, 201 bp, Homo sapiens
gtgtctaaaagtacgcatataaaccttttaatcagtaaaccaaattttgaaatagtatacctttgcagtcagaagagaatttttgagacattcaaaagtcktcttacagcctttatgttgacacaaagtcctagacaaccacctgctttccctctgttgcctttaccaaacttcattggtatgtgttccaaaccttaagaa

SEQ ID NO: 52122 - DNA, 201 bp, Homo sapiens
tgaaactgactgttattgacattataattaattggtacttgaaataatttgttttgtaatattacatttcttcagtaatacgcaaattatattagaaaacatgtttagcaaaatctttgggggcaacattttttttgtaaggaaatgaatacaaatatttctggagcctactaggcagtttccttagcatcacttcctgta

SEQ ID NO: 52123 - DNA, 201 bp, Homo sapiens
cacctgctttccctctgttgcctttaccaaacttcattggtatgtgttccaaaccttaagaaaagctgcaatccttttggaatattcattttcctcacttyagctgagaaacattcacctctgagatcacatctggaaaagaaaatgacctaacgttttatagttgtcatagcccacatttttggaaagctatgtgaatga

SEQ ID NO: 52124 - DNA, 201 bp, Homo sapiens
gaaactgactgttattgacattataattaattggtacttgaaataatttgttttgtaatattacatttcttcagtaatacgcaaattatattagaaaacatgtttagcaaaatctttgggggcaacattttttttgtaaggaaatgaatacaaatatttctggagcctactaggcagtttccttagcatcacttcctgtag

SEQ ID NO: 52125 - DNA, 201 bp, Homo sapiens
tgttgcctttaccaaacttcattggtatgtgttccaaaccttaagaaaagctgcaatccttttggaatattcattttcctcacttcagctgagaaacattmacctctgagatcacatctggaaaagaaaatgacctaacgttttatagttgtcatagcccacatttttggaaagctatgtgaatgatgccacacaatagag

SEQ ID NO: 52126 - DNA, 201 bp, Homo sapiens
tgcagtggcgcggtctcagctcactgcaagctccgcctcctgggttcacgccattctcccgcctcagcctcccaagtagctgggaccacaggcgcccgccmccacgcctggctaattttttgatttttagtagagatggggtttcaccatgttagccaggatggtctctgtctcctgacctcgtgatctgcctgcctcggc

SEQ ID NO: 52127 - DNA, 201 bp, Homo sapiens
ctgttttgctggtagtttatatgtggtaaagcagtctattaaatgagagaccttagggaggcagctttgttgccatgtggcttatcacattgtccatggargaagtaatgttcctcctttaagtggtgtagcctgagagaaagatggcctccaagatctttaattaaataccagttgaacagaaagaactagagcactgta

SEQ ID NO: 52128 - DNA, 201 bp, Homo sapiens; identical to SEQ ID NO: 9172

SEQ ID NO: 52129 - DNA, 201 bp, Homo sapiens
cctggctaattttttgatttttagtagagatggggtttcaccatgttagccaggatggtctctgtctcctgacctcgtgatctgcctgcctcggcctcccaaagtgctggaattacaggcgtgagccaccgcgcccggccgagatctgatggttttataagaggcttttcccactttgcttggcacttcttcctgctgcct

SEQ ID NO: 52130 - DNA, 201 bp, Homo sapiens
taaaggaaatgaaaacaaaaattgtaagttataagcataagaatacatttggatgatttgaataatttgaaagtagtttttttcatcaaactgacatacayatccctttgaaaggtaatatgtaaatatgaagttttcaaaaaatagggtttattattatggtcaggtaatttttcttataggtataaatatgtgtttttt

SEQ ID NO: 52131 - DNA, 201 bp, Homo sapiens
ctggctaattttttgatttttagtagagatggggtttcaccatgttagccaggatggtctctgtctcctgacctcgtgatctgcctgcctcggcctcccaaagtgctggaattacaggcgtgagccaccgcgcccggccgagatctgatggttttataagaggcttttcccactttgcttggcacttcttcctgctgcctt

SEQ ID NO: 52132 - DNA, 201 bp, Homo sapiens
ccttccagagtgtatacacatagaaagggaatgtggtgatcctccaagcgccttccagagtgtacacacatagaaagggaatgtggtgtcctttgagcacytttcagagtgtatacacatagaaagggaatgtggtgaacctccaaccaccttccagagtgtatacacatagaaagggaatgtggtgaacctctgaacgcc

SEQ ID NO: 52133 - DNA, 201 bp, Homo sapiens
cttccagagtgtatacacatagaaagggaatgtggtgatcctccgagcgccttccagagtgtatacacatagaaagggaatgtagtgatcctccgagcgcyttccagagtgtatacacatagaaagggaatgtggtgatcctccgagcgccttccagagtgtatacacatagaaagggaatgtggtgaacctccaaccgcc

SEQ ID NO: 52134 - DNA, 201 bp, Homo sapiens
atacacatagaaagggaatgtggtgatcctccgagcgccttccagagtgtatacacatagaaagggaatgtggtgaacctccaaccgccttccagagtgtrtatacatagaaagggaatgtggtgaacctctgaacgccttccagagtgtacacacatagaaagggaatgtggtgatcctccgagcgccttccagagtgta

SEQ ID NO: 52135 - DNA, 201 bp, Homo sapiens
aattggtacgttttataggatttttttcaaagaaattaatgaaaaataactgccttgacttagaatattttggaagcaattattcatcttccttttaaatstattctaaatgtgttactggtccacttctctagaagaaagtgtgaaagcttagtgcatacacatagtgacttttatccatactatggtaaccacattttc

SEQ ID NO: 52136 - DNA, 201 bp, Homo sapiens
ttcctgctgccttgtgaagaaggtgccttgctttcccctcaccttctgccatgattttaagtttcctgagacctccccaacaatgcggaactctgagtcartgaaacctctttcctttataaattacccagtctcgggcattttttcatagctgtgtgagaacggactaatagacagccttattgctaatatggagaatat

SEQ ID NO: 52137 - DNA, 201 bp, Homo sapiens
agcatcacactgtgattttgatttgcacttccctaatggctaatcctatggagtaacttttcatgtgcttgatgtacatcttcttcggagaaatgtctatkcagacactttgctcattttaaaaactgggtatttgcctttttattattgagttgtaagagttttttatatagtctagatatgggtcccttacctgatata

SEQ ID NO: 52138 - DNA, 201 bp, Homo sapiens
aacttcatgtaatcaaatagacacccttatttgctagcttgattgttgtttatgtaagtatagtctgagtaactagcaccctactccagaaggcttattgyaatttgtgtattttctaatcgatgctgcctctacctaacaggaatagtctttggcgtcttttactatagattagttttgcctgttttaaactatataaag

SEQ ID NO: 52139 - DNA, 201 bp, Homo sapiens
cagctgccatctgcatttggatcagtctgtcatcagagtccgtggacagactcagccaggccacctggttttgcctccgaacatccatttgcgaaattctytctttgcattatcatttgtggatagattggtatagcataataatttatctgcttgtaggcccagagtgtcaggacatgtgacatattactaggaaggaag

SEQ ID NO: 52140 - DNA, 201 bp, Homo sapiens
acgtcagtgtcattctatatctagtatggttctaattctgagtttaacattttctgttcctagtggtacagaaaagaaatgaggtgtttcaaactctgcamtgactgttaaataattctaatactttttctcccagaatccttgactgaaattcctctttatctttgacattaactttttacatcattgacaatagggaca

SEQ ID NO: 52141 - DNA, 201 bp, Homo sapiens
tttccataaacgtaaaacacattgctatgaatataacagtgatcttcaaggatgttttgcccttcttagaaaaataaaggggacaaaaaagaaggtggctrgcaagttagtgcactagaaacagggtaattaaggcataactcaaagtgacaatcagcctatggcctttctcccatgattcagtgtgtaactagttgatca

SEQ ID NO: 52142 - DNA, 201 bp, Homo sapiens; identical to SEQ ID NO: 9153

SEQ ID NO: 52143 - DNA, 201 bp, Homo sapiens
tcttaattttgtttaaaaattaaatgtttttaagattaactatagaggcagtgtaaaatgaatagcaaatttattgaatccgattcatatacctaggcctkctgaggagaattcaaaacaaagaagcccttctttattttgccgtatcaattatggggtgtttctttctgtcaccagaacggttatttcatctgtctcttt

SEQ ID NO: 52144 - DNA, 201 bp, Homo sapiens
ctctttaagttatttaatatgtacagttatgagacttgttttttcaacttatattggttttttgaaatttatttatactgctgtatgtaggtatagttcatttatttccactcctgggcaatattccattgtgtgtatttatttcttcccctctgtgtggacatttggatggttgctgggtcctttcgtttgtttgttatt

SEQ ID NO: 52145 - DNA, 201 bp, Homo sapiens
gctccctatggatgtggactcagtagacttccatgccaagaatgggtgacaacatatttagtattatgaagaaaggtattaaaatttgagaagaaaacttyacataaaattacagtggccaggcatagtggttcacccctgtaagcccagcagtttgggaggccgaggtaggaggattgcttgagcccaggagttcaagat

SEQ ID NO: 52146 - DNA, 201 bp, Homo sapiens
tgacttacaagttaagtctgtgtttttgggaacaagtgacccaaggcattgcagagcatactactaatttcagtttcagatgggtcaaaagcttggaattrtgagagagcattatctattcagggaactgcaagttaagttaattttaaaattgtcacatggcaatgatcagttataacaagcaaacaaataaaagtgcaa

SEQ ID NO: 52147 - DNA, 201 bp, Homo sapiens
ttaagtaaacctgtcacacaaaattatgagtgaaagaattaattacctagattattaaattattttacagatccaaatgctttttctttagtttttcaggwtatatatatatatatacacacacacacacacacatatatatatactatctatctatattatctatctatctgtctgtctatctatctatctatctatcta

SEQ ID NO: 52148 - DNA, 201 bp, Homo sapiens
tgttttattcggttgtagaaaaggaaattgcatatttcttataattttttttaattctgtgattgttactcaaatagagacttgtagtgtacaatttgggwtatttgaggttacttaatatgaaaggaataaatgctttaagattttataaagtgattaaaatatctgtgataggaattagactcctgggcatttttaggc

SEQ ID NO: 52149 - DNA, 201 bp, Homo sapiens
gtggaagactatggataaattataaaacttcttttgttgaagcagtgacttacaagttaagtctgtgtttttgggaacaagtgacccaaggcattgcagarcatactactaatttcagtttcagatgggtcaaaagcttggaattatgagagagcattatctattcagggaactgcaagttaagttaattttaaaattgtc

SEQ ID NO: 52150 - DNA, 201 bp, Homo sapiens
gcctccatgttgatggctgccgaagaatcagggggaggttgctgaaggttggggtctctgtaatgatttcttaaaataagacaacaatgaaattcgccacrttgactgacatcctttcatggaatatttctctgtagcatgtgttgctgtttgatgatagcattttacccacaggagaacttctttcaaaaagagtcaatc

SEQ ID NO: 52151 - DNA, 201 bp, Homo sapiens
gcattggcttcaacctcaagttccagcttcatcagcctttaccaagagagtcagtctttcctttgaagctttgaagccagatattgacctctctctagctrtgaaatttctagatggaatcttcttccaatttaaggctgttttgtctctattgaaaatctgttgtttagtgtaaccaccttcatcatttatctcactcag

SEQ ID NO: 52152 - DNA, 201 bp, Homo sapiens
ctgaagaatccatgcagagtctattaaccctatgttaatacctgaaatgataaattcatgtaaaactgcgctggatagtacaattaagaaaaatgcctagytttaaaaatggttaacagttgagtacaaagaagactgatcatgattctcgtttctggaaaaacaattgttgggcactgttgaatctaagtcctcagttca

SEQ ID NO: 52153 - DNA, 201 bp, Homo sapiens
cagggtaaagcacgcaccgcagtttcttcaataaaaataaataaaaccatttaaagtaagtaagtggcctgctgatggtgtgctggtagcttcattttccragttgacagacatactttaatgttacctgtgaaaatttaaagacatagaatttctgcaggtacattgtgcatgtagtatttttggttttgattccttaat

SEQ ID NO: 52154 - DNA, 201 bp, Homo sapiens
aacttcaggcatattcttttattgtcttattattccctgctgtgaaatgtcaacacttgaatgtttcttttattcctttttaaatgttttttccagtgacwttttaattgataatagaggattcactgttgtcttcttaaatgaaacttcgggacccatacctaaaatgttacttttcctttctttttatgtgaaattaag

SEQ ID NO: 52155 - DNA, 201 bp, Homo sapiens
aaggtgctttttaaataattgttgagacctgaaaatatttttcaaatagcttgggattattcataatgtaaatacttcaagatacatgaaaatcttttgtrtgtcttattactggtaatgcacatacttttcttggtaaagtagacttgagctattacaatatatttttaagtgtaaaatctgaagaatccatgcagagtc

SEQ ID NO: 52156 - DNA, 201 bp, Homo sapiens
aaaataataaaaagtaaaaataacggaagtgtctagaaggatgaggcaatactgaaatcatcactgttttaccgtcattctattcctcccctcccctccctttctttctttctctctctctctcccttccttccttcctttttttttttttttttaaagaaatagtgtcttattctgtcacgcaggctagaatgcggtgta

SEQ ID NO: 52157 - DNA, 201 bp, Homo sapiens
aaataataaaaagtaaaaataacggaagtgtctagaaggatgaggcaatactgaaatcatcactgttttaccgtcattctattcctcccctcccctccctttctttctttctctctctctctcccttccttccttcctttttttttttttttttaaagaaatagtgtcttattctgtcacgcaggctagaatgcggtgtac

SEQ ID NO: 52158 - DNA, 201 bp, Homo sapiens
aataataaaaagtaaaaataacggaagtgtctagaaggatgaggcaatactgaaatcatcactgttttaccgtcattctattcctcccctcccctccctttctttctttctctctctctctcccttccttccttcctttttttttttttttttaaagaaatagtgtcttattctgtcacgcaggctagaatgcggtgtaca

SEQ ID NO: 52159 - DNA, 201 bp, Homo sapiens
taatataatctacttagtttgtaaactaagtttttccttctggcacctcatgagagttgcagaattcatgatgcctttatttgttcttagtatttttcccttttttttttctttttctgtccctttagtatttttacttcctttggttcttctcatccgccataagccaaattctagaaaagttctgttttctttacttag

SEQ ID NO: 52160 - DNA, 201 bp, Homo sapiens
tctttaataatcaccattctgacaggcatgagatggttatctcattatggttttgatttgcatttctctaatgatcagtgatgttgagcttttatatctayatttgctggccgcacgaatgtcttctttttagaactgtctgttcatgtctttgttcaccttttaatgttttttttcttgtaaatttatttaaactctttg

SEQ ID NO: 52161 - DNA, 201 bp, Homo sapiens
tcccacctcagcctcccaagtagctgaaactgcaggctgataacatcacacccagctattttttttttaatgtttttgtaaagatggggtctcgccatgtygcccaggctggtctcgaactcctgggctcaagcattcatcctgcctcagcctctgaaagtgctgaagttacaggcatgagccactgcgcccagccaggtg

SEQ ID NO: 52162 - DNA, 201 bp, Homo sapiens
aatttcgggtgagactaagctgtactttagcttttttgtgtcaagcaaaaacaatttcagcaacaacactcgcttcccctggtaatttttttcatggcgarttactaaatgctagatgctcaagtcaaaaagaaacctgacatctggggaggtgttgagggggtgttaatagttctagtgagatgtctggggagcgttgag

SEQ ID NO: 52163 - DNA, 201 bp, Homo sapiens
atacaggcacacaaacacataaaaattcacaattctggccgggtgcagtggctcacacctgtaatcccagcactttgggaggccaaggcaggtggatcacraggtcaggagttcaagacaagcctggccaagaaggtaaaaccccgtcgctattaaaaaaaacaaacatactggtttctcctcttattcttgatccaatgc

SEQ ID NO: 52164 - DNA, 201 bp, Homo sapiens
ctccctaaggctcagtgttctcatctgtaaaatggaaataaattcatagagttatttgagaattaccatataggaattaagcctacgttaagcatttaacrtagtcctggcacatagtatgcagtatttttttttttttttttttgagacagagtctcgctctgtcgcccaagctggggtgcagtggagcaatctgggctc

SEQ ID NO: 52165 - DNA, 201 bp, Homo sapiens
gcatgattttgttagataattgcatatatgtatgtatttattttatttttattttattttattttattttgatacggagtctcgctctgtcacccagctgragtgcaatagtgcgatcttggctcactgcaacctccgccttccaggtttaagcgattctcgtgcctcagcctcctgagtagctgggattacaggctcatg

SEQ ID NO: 52166 - DNA, 201 bp, Homo sapiens
ctacttgtacacaatcattctcagactttttttaaaaagatacagttttcaagattcattttagtgtagaaaatgagtgccctggatttgccagtcttccrcactcaaatcccaatgaaaccaaaagggctccaatctcattagggaaagctgcacagtaacctgcagagagggtgtctaagcatcttcaagtcagctctt

SEQ ID NO: 52167 - DNA, 201 bp, Homo sapiens
gagttctagaagtataagtcagatctaagtggcgtggctgatagaaatggaatgctgctatggtggtatcagggagttcgcatggtacctcccttatcacygctagcttcactgtccattggcctgttgaccaaaataaagtttcctcagccaccacaatgttaaattgtttgctacatctcttgctggccaaaaactttg

SEQ ID NO: 52168 - DNA, 201 bp, Homo sapiens
aaagcattgattgattcttttgggataggcagagagagaatgtttgagaaaaacaaaagttatcttaacagattatattcttcctgaggtttgagtttaartagaaatgtagccaagaacattggaaacacattggaaggttctgattggtctcaatagcttatccttgtcaaagaataggaaccaaatattgcctgttac

SEQ ID NO: 52169 - DNA, 201 bp, Homo sapiens
gttttgtggcaaaaacttcaatggctctgttttcttcaaagggtgtgtgacagtattctttcatcttttatgatttttggaacaccaaatttatttgacamtgttcgtaagtggacagatacttaaggcaggtgtttgatagaggagattgtaaagaaagagatgatacagaaatgaagtaattcattggattgatcattg

SEQ ID NO: 52170 - DNA, 201 bp, Homo sapiens
gacattgtcctcataatcagtgaacttagtaacataaagcattgattgattcttttgggataggcagagagagaatgtttgagaaaaacaaaagttatctkaacagattatattcttcctgaggtttgagtttaaatagaaatgtagccaagaacattggaaacacattggaaggttctgattggtctcaatagcttatcc

SEQ ID NO: 52171 - DNA, 201 bp, Homo sapiens
ctctctggcagatatttacttggccctggtgactcctgttctgttttactccctactctcttaccttggctgatactctgttaaattctttctgaggtctyagcgggacagtcagtctctagagtatctgacgacgctcttcaaattacattggtgctgggtcttccctgagggttctgggaatgcgttgtgtacctttca

SEQ ID NO: 52172 - DNA, 201 bp, Homo sapiens
tggcatccttggaccaccctttgaggactgctgtattatggcaattcacttgtctaattgcgaacagaatcttctatatttttattccaataatgttaacsttgcttttgtgtttgtagactaataagtttttttttaataactgcacggtgtatcatattacccacttttctattaatgtctagacctagaatgtgctga

SEQ ID NO: 52173 - DNA, 201 bp, Homo sapiens
ttgttctgaaacatttttggtccaacaattgaaatcacaaaagccctgacccacattccctagaccgctaatctgcctctgtctcctcagcacaccggagycatcctctaaagcctcctgagtctccccaacctgggtctgtatctgactatgagtggcaggtgccatgccaaggagcatgtgtcactgtccctgctgcac

SEQ ID NO: 52174 - DNA, 201 bp, Homo sapiens
tctgtagagaaccttcactaaaaatggtgttccctgccttaccactcagtcttcttccaaaaattgtgtctttcagtgctttctccactttgtccatgccwtctttttagtagcatctcactatgttgttgatctgttttttcccgatgagattgtgagcccactaagggctggtttatcacttagttatccttataactt

SEQ ID NO: 52175 - DNA, 201 bp, Homo sapiens
ttccaacctgggtgacagagcaagactctgtctcaaaaaaaaaaaaaaaaatcaaatgaactactaaatagtgaagagatcaatatagtatatatgtactmttccacacatcattctatctcaagacaaaaagcaacagaaaaatgatgagagattttcattaaagattttagttttcagtgttaaagtgatttaatttta

SEQ ID NO: 52176 - DNA, 201 bp, Homo sapiens
ttatcatttctcatctggagctcttgtgctggcaggcctgtttactgacatccttgttcgagtcttttacaaccaccagatcttcctaaaactccagcttrcttgtgttacttgtctgatcaaaaataatgtagcaattgcaatagcataatgaacatagaaaagtaatagaccttccttaatcctaacttactgttacta

SEQ ID NO: 52177 - DNA, 201 bp, Homo sapiens
ccaagaatagctttgaccaatttgatttaatctttatcacacatttaaagggctcaaattctttggcatataattattatctgcttcaatgattgattttkaaaatgggcacagagaaatagtttaattgtggttgatactgtaaaaaaataaataaataaaaagcctttcttgcataaaggcttactttgcctatttcat

SEQ ID NO: 52178 - DNA, 201 bp, Homo sapiens
ataatttaattttcttgtataatattttaatgactacataatattccatgatgtaatatactgtagtttatttaactatttctaattttttcattttgacrttttatggctgtatacaatgtactgcacaaatataataatatgtattttgaacatccttatggctaaatatttacacctatcctccatgatttttttaat

SEQ ID NO: 52179 - DNA, 201 bp, Homo sapiens
tcattagttcattccctttttttgttggttacactttatgcttgcctttaatagttgatgggcatttgttttgtttacagtttttggttattatgattgaygctgatatcaccatttgtagacagattttttgtggacatatatttttcatttctcttaggtactccagtgtacaattagtgggtcattgcaaggttatac

SEQ ID NO: 52180 - DNA, 201 bp, Homo sapiens
gtgtgtaaccaacaccacagtctttttttaacagtttcatgatcttaaaaggagctccacacctgttagctgtcactctccatttccatcccttcccaccscagccctagacaaccaccgatccttctgtctagattaatttgcctattctgtacattccatagaaatgggatcacgtgatttttagtgattggcttcttt

SEQ ID NO: 52181 - DNA, 201 bp, Homo sapiens
agtttgtcttacataatgttactgcagtatcttaggggtggtgtgattacagggaacagaagcccctcaacaaagctcaggtacaggaggacttgttagargcatgcagcgaactcttcaggaacctggtgatcggagtactttgcccctcctgaagctggaaagccattcattcagcacctccctgctgtcccttccctc

SEQ ID NO: 52182 - DNA, 201 bp, Homo sapiens
ggagtgcagtgatgcgttctcagctcactgcaacctccgcctcctgggttcaagcaattctcctgcttcagcctccctagtagctgggattacaggtgacygccaccacacccagctaatttttgtattttagtagagacggggtttcaccatgttggccaggctggtctcgaactcctgacctcaaatgatccacccacc

SEQ ID NO: 52183 - DNA, 201 bp, Homo sapiens
agaggtgtgcaatttacttaacactcatgccactatcaaaagagttcaggatttcagtgattggatttttgtggggttgagaaaacagaataagaagaagwagtgagcagctttgggaagtcacctaacatacagcagtggactttttaacaacaatgttggagggctggaatattctcggcttgctgggcaatctccatg

SEQ ID NO: 52184 - DNA, 201 bp, Homo sapiens
attgatccctacactatcttgcaaatattacaaatgaagaattacaaaagttgtggtattttagcttatcaaaatgcacccgaaacataaaatatttttcyttaagttcttaaaacagaagaataggaaagagttgaaaataaatgtgatacattttatcattatattagtattttgttgaaattaataccttgaatcatg

SEQ ID NO: 52185 - DNA, 201 bp, Homo sapiens; identical to SEQ ID NO: 9145

SEQ ID NO: 52186 - DNA, 201 bp, Homo sapiens; identical to SEQ ID NO: 9147

SEQ ID NO: 52187 - DNA, 201 bp, Homo sapiens
atatctaccaacctaatgtttaaaggcaggctagtaatataatctacttagtttgtaaactaagtttttccttctggcacctcatgagagttgcagaattyatgatgcctttatttgttcttagtatttttcccttttttttttctttttctgtccctttagtatttttacttcctttggttcttctcatccgccataagc

SEQ ID NO: 52188 - DNA, 201 bp, Homo sapiens
gagagaaatacagtggacttgcatatcccattaaatggttgttaaatgtcttaactagttgagaattaattgtatattagcagttgttatttttgttttgyttgttttgagatagagtgtcattctgtcacccaggctggagtgcagtggcacgatctcggctcactgcaacctctgcctaccaggttcaagcaattcttc

SEQ ID NO: 52189 - DNA, 201 bp, Homo sapiens
catcttttttttttctattatagtcatttgccttgagtgtgaagtagcatcacactgtgattttgatttgcacttccctaatggctaatcctatggagtawcttttcatgtgcttgatgtacatcttcttcggagaaatgtctatgcagacactttgctcattttaaaaactgggtatttgcctttttattattgagttgt

SEQ ID NO: 52190 - DNA, 201 bp, Homo sapiens
aaaagctatgaaatgggtgagtcattcaacatctccttgcttcagtatcagcgttacttcgaaagtgaggttttactttcaaatgtattgagtatcagggygaatagaacttagggctgagaggatgtcccttatgattttttgagcttggcatttaatattttacagcaaagtttttagcttaacataattgaacttgta

SEQ ID NO: 52191 - DNA, 201 bp, Homo sapiens
cccaagcctctaacaagatcagattttctttcacagttttgtgtacgccctgattgtaaaagttaaacttgtgttatagctgttttccttggtagaactcmatgaataggagcttattcatcagtgtactgttggtcctgtaagtgtctggcacacagaaggatgtctataagcatttgttaaattgaactgtaccagtcc

SEQ ID NO: 52192 - DNA, 201 bp, Homo sapiens
ttttaattgccaggggatccatgtgatacaatggggtcaataattacttatcttcctgtagtttttgttattgctgttaagttaaaatgcccaaaacagtyactatctgcattttacggaggaagaaattgagtccttaagaatttaaagacgttttgaaagtcattcagctagcagttgggtagacctaggatggtcagt

SEQ ID NO: 52193 - DNA, 201 bp, Homo sapiens
tctagagtattcattaggaaatactcttccacttaatagtctagatttattgtcatatttacaaatttacaaagtaggagaagtggggaaaatgggcaagkaaataagctacctattctctttcatgtttctttttttttcatgattaataagaccagtattttagtttcattttcatgtgaaaatgacaagtttttgttt

SEQ ID NO: 52194 - DNA, 201 bp, Homo sapiens
caccagcatctcttttaagatttcattacctcttggctgtttcttactgttgccctctggctcttaccttcttctagttaatagtcatagtacctaaattktgtattgggaaaagacattccctctacactgcctcattaattctcatccttactcaagtctcttcaaccttgctcaaggctcatcatctagggcttggac

SEQ ID NO: 52195 - DNA, 201 bp, Homo sapiens
ttttaaaattttaaaataacacatacaataacaagaacaatacagatctagagcttgggctcgaattccccataccacatcatttcttccactccacagtracaccaacctcatcctgcttgagctctctgacccctcttattagggctaccccctctctattttgcccatttttaattaaaatgttataggacacacaca

SEQ ID NO: 52196 - DNA, 201 bp, Homo sapiens
tttgtttttgatatacctatgttgatatacttacatacatatataggtgtacttatatttacacacatatgtatgactattataagcattgctgatgtcarcgttcttttatatgtgttctgaagaagatgtgcaagactctagggtatatacccaagagtagatatgtaaagaatgctcaattatatgaaataatatgaa

SEQ ID NO: 52197 - DNA, 201 bp, Homo sapiens; identical to SEQ ID NO: 9157

SEQ ID NO: 52198 - DNA, 201 bp, Homo sapiens
gcctttgtttactattagagaatatggtgagaaggttttgaaggaaatacctactttttttcagtgacttcgaacggtttttttttttagagccatcattyatccaaatattttttcaaaaatgacagctactaaaactactgataactaaacaattactgtatattacagatactgtgttaaggatagagttaggtttat

SEQ ID NO: 52199 - DNA, 201 bp, Homo sapiens
aatgtgaatcagatttaaagaattgagaaggctggcaattcaaaaatagaggaagaaaacactctttggggttatgaaaaaaaggatcctcttagtattargatttcttaaaaagctatacacagttttaagatagattgttcttgaagataatggggcaaataattacctgctaaacaaattatgagtcctgtgattctt

SEQ ID NO: 52200 - DNA, 201 bp, Homo sapiens
gagcttctgctgtttagagtctgctttcattattttacttttactttcttatctagctatgtgagggtactatgtaaaagtctggtgatttgctttagatmcttaagagaaaagcttagctgtagtcacatatagtgtctaagatggctttccttatagttacatgtttttaatagttgagtttgcctatactcttcataa

SEQ ID NO: 52201 - DNA, 201 bp, Homo sapiens
ttggtaatatgtttattttcaattcttaattaagaggaaaccctgtttgtaacatattattcctatgagaaaatatgatttccattgaaatatcttgtttyattgtcatgtgacatgttgtctaggcatgcagcatgaagaaagggaaaacccctgacttctaccagaggaatcaatccaacttcgtgttagtttgactta

SEQ ID NO: 52202 - DNA, 201 bp, Homo sapiens
agtcctagagattttcctgcaaaaagttttaacaggctttattccagtaagggaaattcagggtgtttatcctgtggtagtaacaaaagcaagggatttgktgaatttgcaatagaaattgccagaatctagatgaccctaggaacatatttttatttaaagagtctagtggggtccagcaaggacttgtaattatatttg

SEQ ID NO: 52203 - DNA, 201 bp, Homo sapiens
tcatgaagtccactccaaaatgaagctttctgtctccctctgaattccagatgtcaagagaggaaatgattggtccattagttaggttcccagtgttgttycattctcctgaggtctgtggtttgggtataggttcttaagaaaaaggtttaggtaaggaagaaattatatgcatcttttgtatatgaaattactttttgc

SEQ ID NO: 52204 - DNA, 201 bp, Homo sapiens
ttgagttccttctcttttctccagtaacttcaagtgccaataataccttgtttgtgttacaattgcattttacaaagctaaagggaaataatttgtagggktaacttttgtgtgtgtgtgttttgatatactcttgaggttttggagaatacacattatcccctgtaatctatgattgttaatctgtcaatctattgtacc

SEQ ID NO: 52205 - DNA, 201 bp, Homo sapiens
tgaatatgtacatttctttgacttaacttactgtgatatgtagaatgctcttttaatgttccttacctgaataagcaaaatttatttaatatgttagctaracaaattttgcttattattttgcttaaattttgcttattatttccttataagttactatagacttaatattctttgctgttcatcaagagggaaagtaca

SEQ ID NO: 52206 - DNA, 201 bp, Homo sapiens
caccactgaagagtaaaactctctaaagattcacatgattgttagcatttttagcaataaagtatttttatactaaggtatgtacattgtttcgacataawgcttttgcacacttaatagactatagtacagtgtaaacataacttttatgtgcactaggaaaccaaaaaacttgtgtgacttgctttattgtgatatttg

SEQ ID NO: 52207 - DNA, 201 bp, Homo sapiens
tataactaccagaaaatttaacattccttatgtggctcacatttgtggttcactttatgtttttattggtcagtgctgctccagaggctaagggactgtgrctaataaggtaactgcagtggggttccatttgtctgtgatctattatattacacatatttctccctactcaggtgtcatagttcactccatagtgtaaat

SEQ ID NO: 52208 - DNA, 201 bp, Homo sapiens
taaaaatacaatgaaatttgtgtttctttttaaagtatagtttatttattgtttaatctttctaaaattgggactccctgaaggcaagaatttctgttgcrttcgttactaataaatctgaagaagctagtctgaggctgagcatctagaaggaggacatacctgtttatagactagttatttattgaatgcatggagaag

SEQ ID NO: 52209 - DNA, 201 bp, Homo sapiens
caccatggaataattgttgttcctgactccttcctttaggcaattgttgtcaagacattttgggccagggctgtaatctaggaccaggagccatcagagtktatttaagaagaagtagagacatgcggcaacctaatagttgacagcagcaaatgaaacgagaagcacgtagagcccttaggtacaactggccttacctga

SEQ ID NO: 52210 - DNA, 201 bp, Homo sapiens
agaaacacagccagaaggtattgtcttttgtctcattgccccacttttaaaaatgttatcaagcctttccaattgtagaaaagtaagactgttatgccacrttttgttatttttctttaacttttagatatggataaactaccttgccatttgtcacaaagaaggttatatttcaattttggtaaatcaaaattttgtgta

SEQ ID NO: 52211 - DNA, 201 bp, Homo sapiens
tactggtttttacattaatctttaagtaatatgttactttatgtttttgttttgcgaaaatggtagcattctgtatgaagtcttcggatacttgctgtttsaaatttttttttaatttagtttttgtgggtacaagtgtatatattcatggggtacagagatgttttgatacaggcatgcaatgtgaagtaagcacatcat

SEQ ID NO: 52212 - DNA, 201 bp, Homo sapiens
ggtgaggggaatagtttaagttttttattttaaaagcttgaatagcattctcttatgtaaacggaatgtggacacttaactgttttcatcaatatgttatmaactacaaaactcactcagactgaattggtaagttacattgtttaagtgatatccttgcttctgtggtttatttcagatgtagactctgcaggggttggt

SEQ ID NO: 52213 - DNA, 201 bp, Homo sapiens
tggagcctgaagatgtgactgaatttgtataatctcatgagaaaacatggacggatgaggagttactccttatagatgagcaaagaaagtagttactagaratggaatctactcctgattgaagatactgtgaacattgttgaaataacaacgaaggatttagaatatcatgtaaacataattgataaaacagtggcaggg

SEQ ID NO: 52214 - DNA, 201 bp, Homo sapiens
cttatttcccatgaataaacaagtgtgtgtttcccagaaagaaacaagaccttgtcctggaaaccacaacaaaaccatcaaaatcattgatcatcactacyatctaatcgtcagagctcattcaagtttccaagttgtcccgataatgtccttttcagcaaaaggattccatttagaatcacactttgcattttattgtct

SEQ ID NO: 52215 - DNA, 201 bp, Homo sapiens
ttgttccaactttaaaataaaaggttataatcttttttcaagaaggaaaaaaggtaattgaaaactgaacagttaaattctactggaatttcagtgagttsgtagataatgttgataacgggaagatgggcgtgccttgagtattacttcagagactggggattggagacttcagaaattcccgaggtccctaccacattc

SEQ ID NO: 52216 - DNA, 201 bp, Homo sapiens
aaaaggtattccagaatctggtttggaatagatgccaaactatcttttccctcttgttaagatgcacacttgactgaaggaggacagggaatctgaagacwccggatgacatcagagctacttttcaacagccttctcaattttctttctcagaaagcagaggctcagagcttggagacagacggtgagaatatttttttc

SEQ ID NO: 52217 - DNA, 201 bp, Homo sapiens
tcagtttttaacctagataatggtctgtcactttagtcatattttttcctctcccaaagtatatattctttgtcatgatcagttatgtgatttttatttgyaccgaatttattaaaatatgtatcaaaaactgcatacttgtcagtgatcacctttccacttaaaagtataatatgtctgaaggagctgtgaatctcagtt

SEQ ID NO: 52218 - DNA, 201 bp, Homo sapiens
tcttgtaaatttatttaaactctttgtaaactctggatatgagacctttgtcagcacatcggactcattttaaataaatttatgattttgtatgtaatatrtcatttttatttttgtttttcatggctttatttaggtataatttacatgtatccagcaattcatccactgcaagtgttcagttggaaggttttgagtcaa

SEQ ID NO: 52219 - DNA, 201 bp, Homo sapiens
tgtcctaatggtcaaagctgcattgtagaaatccctttaaattcagtactcaaataggtattacttgatattgcagaacaaattgggggagatctcatggwcacaattggaagtcatgaggtagtccttagatataatttaaatggcataccaagtgaactcgtagatgtttaatcatttaaatgtgtttttaatggagta

SEQ ID NO: 52220 - DNA, 201 bp, Homo sapiens
attcatttttttcaagtaattagaaatatattttaagaaatgaaacttcaggcatattcttttattgtcttattattccctgctgtgaaatgtcaacactwgaatgtttcttttattcctttttaaatgttttttccagtgactttttaattgataatagaggattcactgttgtcttcttaaatgaaacttcgggaccca

SEQ ID NO: 52221 - DNA, 201 bp, Homo sapiens
ctacaagtaactgggcataaaagaattagagagcaaaatcctggacttctacagctaggaagatgcttggcagtaactgcatagaagagatagcttcataytgtagagagaattttttttaaagcttagtcaaccccaaatctatagcgttttatttctgccataaagacagtttacatttacagtccaccaccatagtta

SEQ ID NO: 52222 - DNA, 201 bp, Homo sapiens
atatatgatttgcaaatattttctcctattctatgggttatcttttcattttcttgatggtatccattgaaacacacaagattttaaatttgacttcagtmcaatttatctattttttgttattcatgctttcagtgtcatagctaagaaggttttgcctaacagaggtcacaaggatttactgcaatatattcttctaag

SEQ ID NO: 52223 - DNA, 201 bp, Homo sapiens
agtgatcctccgagcgccttccagagtgtatacacatagaaagggaatgtggtgatcctccgagcgccttccagagtgtatacacatagaaagggaatgtrgtgaacctccaaccgccttccagagtgtatatacatagaaagggaatgtggtgaacctctgaacgccttccagagtgtacacacatagaaagggaatgtg

SEQ ID NO: 52224 - DNA, 201 bp, Homo sapiens
tctacagctaggaagatgcttggcagtaactgcatagaagagatagcttcatattgtagagagaattttttttaaagcttagtcaaccccaaatctatagygttttatttctgccataaagacagtttacatttacagtccaccaccatagttaatagagatagaagtagttgtaactacagcatcgttaatgaagacaca

SEQ ID NO: 52225 - DNA, 201 bp, Homo sapiens
atatttccaggttcatccatgaacctgttgatgagctgtcagtttcaaagcgccttgtccttttcagatatatactccttcaaaaccaggaaaacagggawtgaagaattgaattacaatgttatgtttaaattcttatgaaaaaaaatcagtgaagttgttttgtgtcatttctttattcttattgtgtaaattattcat

SEQ ID NO: 52226 - DNA, 201 bp, Homo sapiens
gtgtagaaaatgagtgccctggatttgccagtcttccacactcaaatcccaatgaaaccaaaagggctccaatctcattagggaaagctgcacagtaacckgcagagagggtgtctaagcatcttcaagtcagctctttagacctttcttggtactcagggagctgcagcaaatccttactgcagcttcaggtaggcgact

SEQ ID NO: 52227 - DNA, 201 bp, Homo sapiens
tgggcgatagagcaagactcagtctgcgcccccaccccacccccaaaaaaatcttgcaatttgcctttaatggatggttttataaacaataggatagaggmatcaatacgcttattgtgactaagcagtgtcatatgattgaaagtaccaaggcatagtaaaatatataaatacatgatccaactgtagatgtcagaatct

SEQ ID NO: 52228 - DNA, 201 bp, Homo sapiens
ggggtttcaccatgttagccaggatggtctctgtctcctgacctcgtgatctgcctgcctcggcctcccaaagtgctggaattacaggcgtgagccaccgygcccggccgagatctgatggttttataagaggcttttcccactttgcttggcacttcttcctgctgccttgtgaagaaggtgccttgctttcccctcacc

SEQ ID NO: 52229 - DNA, 201 bp, Homo sapiens
gcgaacttgttcagtgtggtctgactgctttacagactggctgttcccccatctcatctccctttccttgggattccctgttccttgagacacaacaataytgaaattaggccaattaataaccctataatggctaagtatttaaatgcaaggaaaagttgtaggtctcttactttaaatcaagagctagaaaaggttaag

SEQ ID NO: 52230 - DNA, 201 bp, Homo sapiens
aagagagtcagtctttcctttgaagctttgaagccagatattgacctctctctagctgtgaaatttctagatggaatcttcttccaatttaaggctgtttkgtctctattgaaaatctgttgtttagtgtaaccaccttcatcatttatctcactcagctggatcttctggcttttcttgctgagcttttctgtcagcatt

SEQ ID NO: 52231 - DNA, 201 bp, Homo sapiens
ttccacaagaggtgtgcaatttacttaacactcatgccactatcaaaagagttcaggatttcagtgattggatttttgtggggttgagaaaacagaataakaagaagtagtgagcagctttgggaagtcacctaacatacagcagtggactttttaacaacaatgttggagggctggaatattctcggcttgctgggcaat

SEQ ID NO: 52232 - DNA, 201 bp, Homo sapiens
agcaagtaccattttttcaacagcatgttttcagtttgtgtctttgtggtcatgttttgataattctcacaatatataaaactttttcatattattatatrtgtcatggtgatctgtaatcagtgatctttgatgttactattgtgattgttttgaggtaccatgaactgtgcccatatcagccggcgaacttgttcagtg

SEQ ID NO: 52233 - DNA, 201 bp, Homo sapiens
ggcacatgctgttggaaaagtggtaccaatagacttcctcaacagaattgccacaaatccttagattgtaaaaaaaaaaacaaaaaaaaaacaaaaaaaamccccacaataatggcaaagtacaatgaagcaaagcacaataaaatgacgtgtgaccgtacagttttgtaagcaagatgattgaaagatctactgagtgcc

SEQ ID NO: 52234 - DNA, 201 bp, Homo sapiens
tagataacaataggaattagtattttattatgtatatgtatgcatttattttaaaactaagctaatccaaagtgaattggcttaacttataagaagacatwgagaaattttatttctcatttacaaaggacaaagtgacatcatgtattgaagttttttaggaatatattaattaaatatatgtccatctgtgtgttcttt

SEQ ID NO: 52235 - DNA, 201 bp, Homo sapiens
gactagagtgatgtcatataagtcatttcaatagtatttaatttgataatttgacataatttttcttttttactttatttttgaaaaactagcaatctttytaggatagtaaattttgggttattttcatgcaaaggtatttaatttatcaaaaatatgaaaaaccactaattgagaacatttacatgtacatatagcata

SEQ ID NO: 52236 - DNA, 201 bp, Homo sapiens
tgatatttactctcaatcatttagacatatcaaactgacacattattaaaactgacaggttttccttgcttcgttgggacttcttggtttttctaaccctktaactatactagacattttcttgttttgagaaggaatgagacggcatcaaccacatatgcatttcattaaagtatctgccttttccttgcacaggtttgg

SEQ ID NO: 52237 - DNA, 201 bp, Homo sapiens
tatatctctaaaaataataggatcatgtttttactgaattgattcataacatggtcctatgtttgtgaaatcccttaaaggaaactttcatatgcatttaygacaggactgcctaatgagagctgcatacgccatttctacataaaaggaaagatttcatgtgatatttactctcaatcatttagacatatcaaactgaca

SEQ ID NO: 52238 - DNA, 201 bp, Homo sapiens
cttttagagttaacaagatttagattttcctcttaagaaacttttcttaaactatattattaaatatttcctacattctctggagctgcactacctgatakggtagttgttagccacatgtggctgttgagccctggaataagactagtccaaatgaagatgtgctataaatgtaaaagacacactggattttaaagactg

SEQ ID NO: 52239 - DNA, 201 bp, Homo sapiens
aagggtaggatttactgtggtcacgtgagtttgaagtgtgtttgaacttagactctaacctatttctttcttcattgaaagttgttaagtgcgatgccatyagtatagttcattttcagttctggattgtagctcatttaaagatacacaaatactacgttttggttatagaaattggctccaacatattctgaaattcaa

SEQ ID NO: 52240 - DNA, 201 bp, Homo sapiens
tcgcctggctggagcgtaatgaatgagcaaaggactaaatgatgcgagataaggttggtcagatgcactggagccagttgatgcagagccttccaaaccayagaaaggaattcagactttattcttaagtgaaatagaaactattatgagtttttagccaagagatttaccttttacaaagagcattggctgtagtgtgga

SEQ ID NO: 52241 - DNA, 201 bp, Homo sapiens
agaattggagctagggattagataggttttagtgaggctttgccacggaaaagctatgaaatgggtgagtcattcaacatctccttgcttcagtatcagcrttacttcgaaagtgaggttttactttcaaatgtattgagtatcagggtgaatagaacttagggctgagaggatgtcccttatgattttttgagcttggca

SEQ ID NO: 52242 - DNA, 201 bp, Homo sapiens; identical to SEQ ID NO: 9139

SEQ ID NO: 52243 - DNA, 201 bp, Homo sapiens
cctgatatggtagttgttagccacatgtggctgttgagccctggaataagactagtccaaatgaagatgtgctataaatgtaaaagacacactggattttraagactgtaaaagattgtaaaatatctaattaataattctgtatgttgtatagacatgaaatggtaatttttgatgtattgggttaaagtgcattattat

SEQ ID NO: 52244 - DNA, 201 bp, Homo sapiens
aaacgtagtcgggactcaagaaatgtttgctgagttaattttttttctcattagcgttggatagaactcttagctccaagaaccacattataatttaagtyggacatctctgtcttatagccaagggaaatacgctctcacactgttctgaaaaggtacatgtcactgtcttagcaaaacccttacctaatacttaatgaa

SEQ ID NO: 52245 - DNA, 201 bp, Homo sapiens
gggaaaggaatcattacttctcagctgctgaagtcgcagtttattttgttttaggcctctttgcatagcatattctagaggatggcgaaggataatacttyggggtgaaaatgttagtatccttaacatacttccgggtggtttaactattaatcagaagcaccatggagattaaagaattggagctagggattagatagg

SEQ ID NO: 52246 - DNA, 201 bp, Homo sapiens; identical to SEQ ID NO: 9140

SEQ ID NO: 52247 - DNA, 201 bp, Homo sapiens
cactccatagtgtaaatatgggctcaatacttctcagtgcatatttttgtcttctcatacctctctactgttgaacagtctatgtcctctcctgagaaccycttttcccactttgcctacatggctaattcttttaaccttttaatggccagcggaagcattattttctctgcaaaatgttctctgaactcccttacatca

SEQ ID NO: 52248 - DNA, 201 bp, Homo sapiens
agaagtaagaggaatgtatttaaaagatagacttgagtagtccaaatatctttcccaaagtctatgcactaaggtgtgtgtgcgccctactccttggtgarcccattagtcccttacccagaacctattaagtttactttagacagaattgtgacaagtgaggctatctggattcccagtccgcactagactggaagttac

SEQ ID NO: 52249 - DNA, 201 bp, Homo sapiens
ttagcttttcttgtaatttcatcaagaaaatctttaaaatgttattttttaaaagactgcataaaattactaataattatttggttgcaagtcacttttcrtatattcatttatattttacttataattggaatttaaaatcaatgacgcaattatttgtaaatactaaaatttttttattcagatataattaggtgttaa

SEQ ID NO: 52250 - DNA, 201 bp, Homo sapiens
tgaatttgtccagtgaggataagtagcaagttgtaattaccttctgtagtttaagtcattggctgtattgaatacttcagtgaagtatcgcgggggaaaaytgtggttgtacatactaccttgtgagtgttgcaggatttagtagttctcaatgaccattgttacttttaaaaaggaaaaaaagtagtgaggggataggat

SEQ ID NO: 52251 - DNA, 201 bp, Homo sapiens
tatcttgcaaatattacaaatgaagaattacaaaagttgtggtattttagcttatcaaaatgcacccgaaacataaaatatttttctttaagttcttaaawcagaagaataggaaagagttgaaaataaatgtgatacattttatcattatattagtattttgttgaaattaataccttgaatcatgctatggataaacat

SEQ ID NO: 52252 - DNA, 201 bp, Homo sapiens; identical to SEQ ID NO: 9142

SEQ ID NO: 52253 - DNA, 201 bp, Homo sapiens
taaatgtgatacattttatcattatattagtattttgttgaaattaataccttgaatcatgctatggataaacatttagcctagaactctaaaagtagtakaatgtgaatcagatttaaagaattgagaaggctggcaattcaaaaatagaggaagaaaacactctttggggttatgaaaaaaaggatcctcttagtatta

SEQ ID NO: 52254 - DNA, 201 bp, Homo sapiens
tgtcacacaaaattatgagtgaaagaattaattacctagattattaaattattttacagatccaaatgctttttctttagtttttcaggatatatatatayatatacacacacacacacacacatatatatatactatctatctatattatctatctatctgtctgtctatctatctatctatctatctatctatctaaag

SEQ ID NO: 52255 - DNA, 201 bp, Homo sapiens
ttggtattcaaaattgggaatgtggataagggactattgacctgtgagaacagtcaatatggaaacttattgtggagggaatagccctttgagaaataaayggcataatcacactttagtgcttgttttggttcccagatctgggatacagtggttgttttatagccctacccccaacacatttttgataatactacctcc

SEQ ID NO: 52256 - DNA, 201 bp, Homo sapiens
agagacttgtagtgtacaatttgggttatttgaggttacttaatatgaaaggaataaatgctttaagattttataaagtgattaaaatatctgtgataggrattagactcctgggcatttttaggcattcttaaaatgtggtcatagctgcactttttcggttgtgtataaatctgtactgcaaggggagaaaagaaattc

SEQ ID NO: 52257 - DNA, 201 bp, Homo sapiens
atactgtgttaaggatagagttaggtttatcctataggaaagttttaaaaaatatcttctattttgtctacagtaagttacttgatagtacaaggagtttrttagaattttcaaagtttttaagacttttataatgaggcagtgtgtggtttgttaggtggttgtagtgagaatttgaagagttcttgttttggatagtca

SEQ ID NO: 52258 - DNA, 201 bp, Homo sapiens
ttctctgaactcccttacatcacagccaggaccccaagagaaagatacattctgtcctctggggtatgacagtatgttggccaatatctactgaatgtctrttgtctgctgggcacagggatgggtagctggaagtccccaaatgtgaatgagagggatatggaccctgtgcctgtactgcttgcattctacagtgggata

SEQ ID NO: 52259 - DNA, 201 bp, Homo sapiens
tacacatagaaagggaatgtggtgatcctccgagcgccttccagagtgtatacacatagaaagggaatgtggtgaacctccaaccgccttccagagtgtayatacatagaaagggaatgtggtgaacctctgaacgccttccagagtgtacacacatagaaagggaatgtggtgatcctccgagcgccttccagagtgtac

SEQ ID NO: 52260 - DNA, 201 bp, Homo sapiens
agcaaaagttccaatttgaatataagctcatatttagcttttaaataaacatctgtttgcaattctgtgaccctacagaagaaagttgtgaacatagatamcttttggggcattaggtgggttgagtgtgtggctatttcaaaaccatttccttcccccggaatttattgaaaagacagtaaaacatattggtcagggcta

SEQ ID NO: 52261 - DNA, 201 bp, Homo sapiens
cgccttccagagtgtatacacatagaaagggaatgtggtgaacctccaaccgccttccagagtgtatatacatagaaagggaatgtggtgaacctctgaaygccttccagagtgtacacacatagaaagggaatgtggtgatcctccgagcgccttccagagtgtacacacatagaaggggaaggtagtgatcctccaacc

SEQ ID NO: 52262 - DNA, 201 bp, Homo sapiens
tacacatagaaagggaatgtggtgaacctccaaccgccttccagagtgtatatacatagaaagggaatgtggtgaacctctgaacgccttccagagtgtayacacatagaaagggaatgtggtgatcctccgagcgccttccagagtgtacacacatagaaggggaaggtagtgatcctccaaccgccttccagagtgtat

SEQ ID NO: 52263 - DNA, 201 bp, Homo sapiens
ttgatttaaatgaaataaacaattgaatatttagaatgaccttctcctcgtgattccttcaagtgatgaactacagtgtgtggtttcaaatttgtgattcraattattttagtatctcatctatatattttttgagagtgagagaatgtgtgtgtttgaatgtcaaattcccttccttcctactgggaatttggtcattga

SEQ ID NO: 52264 - DNA, 201 bp, Homo sapiens
caaccgccttccagagtgtatatacatagaaagggaatgtggtgaacctctgaacgccttccagagtgtacacacatagaaagggaatgtggtgatcctcygagcgccttccagagtgtacacacatagaaggggaaggtagtgatcctccaaccgccttccagagtgtatacacatagaaagggaatgtcgtgatctatt

SEQ ID NO: 52265 - DNA, 201 bp, Homo sapiens
aaacttaaaggtggatgttcaccttgcctgtttctctagatgttgtctatcacatccctttttaaaaatgaacataattcaccaatcctaagacagatctygaagcagattgggagttcagtaagaatatgttgtattgatttaaatgaaataaacaattgaatatttagaatgaccttctcctcgtgattccttcaagtg

SEQ ID NO: 52266 - DNA, 201 bp, Homo sapiens
cgccttccagagtgtatatacatagaaagggaatgtggtgaacctctgaacgccttccagagtgtacacacatagaaagggaatgtggtgatcctccgagygccttccagagtgtacacacatagaaggggaaggtagtgatcctccaaccgccttccagagtgtatacacatagaaagggaatgtcgtgatctattttaa

SEQ ID NO: 52267 - DNA, 201 bp, Homo sapiens
cattttctgaactaaaaatgtttgttttatagttttcatttaaaaatcttaaaacaatctttggaagatttttcatatcacattttttaatttttttgtgsttggtgatataagagtcatgtgaaaatgtgaaaagaagtagcatgaggagaagatatttttattattagagatgttctagaaacttaaaggtggatgttc

SEQ ID NO: 52268 - DNA, 201 bp, Homo sapiens
agttactccaaagagctgttgagaaaggtgagaagcaaacactctctgttaattttgtatttacactcttttcttatacttatgtgctgccaaaataattkgttaatgattattttgtgttcattaagaaaaactattgtttctttgataacagtagaaggtagtgaatagacattagtactaatcataaataggtatgta

SEQ ID NO: 52269 - DNA, 201 bp, Homo sapiens; identical to SEQ ID NO: 9151

SEQ ID NO: 52270 - DNA, 201 bp, Homo sapiens
ctgggcaatatggtaaaacccgtccctacaaaaatcaaaagttagtcaggcatggtggtgtgtgcctgtggtcccagctgctcaggatgctgaggtaggasgatcgcttgatcctggggagtcggaggttgtgctgagctgagatggcgctgctgcattccaacctgggtgacagagcaagactctgtctcaaaaaaaaaa

SEQ ID NO: 52271 - DNA, 201 bp, Homo sapiens
aacaggtattagtgcttttgcacgtttaataatgataaactttcaagagtagccaactttcctatgatcaaagagttggtaaatggtagagccggaataarttgaacccagagccatccgtctccaaaagaccaccttggaagatagttcatggtcactagaggtttttagaaataagctagatatccagagatagcaaat

SEQ ID NO: 52272 - DNA, 201 bp, Homo sapiens
ccattagtcccttacccagaacctattaagtttactttagacagaattgtgacaagtgaggctatctggattcccagtccgcactagactggaagttaccmatcagaagatgaggagaatgttagtggcagctatgctagtaacagtaaggacaatagattgtcagttagtgaagggggagagagagaaattacaaaaggc

SEQ ID NO: 52273 - DNA, 201 bp, Homo sapiens
aggaatccagagactgttcttttcaccacaatgctttgtggccttcctaataaaagcaagagactgacactggcagagacaagattttagagtgggaaaartaatccagaattctcagagtgctgcataaattttgctttacgaaaagttttcaaatccacatttgttacagtctgtggcaattgaatatgataggaaaga

SEQ ID NO: 52274 - DNA, 201 bp, Homo sapiens; identical to SEQ ID NO: 9156

SEQ ID NO: 52275 - DNA, 201 bp, Homo sapiens; identical to SEQ ID NO: 9159

SEQ ID NO: 52276 - DNA, 201 bp, Homo sapiens
cttttatctatcctggtaatacttgactgacctgagtcaaagtcacattttcttttttttttttttttaactttgaatttcttttgcttgggctttcacarattgaagttatttcatagaatcgttagatttttcaggttggaagagaatttgataaaagctacggctgctctggatttaagcacacctatcttagaggca

SEQ ID NO: 52277 - DNA, 201 bp, Homo sapiens
gtggggagaagtttcttcactcttgtacttttcccttctgccccttcaggtgattgatacacaatcagagtgggttttgttctgtgtgtttgtttaataaygatttactgttacacggatgaagactgggaaaaagcatttgccgttctagcaaagtcctgtatacccatgtcttccaactggagaaatattttcattaaa

SEQ ID NO: 52278 - DNA, 201 bp, Homo sapiens
gtacatttgttactccttgtatggtaaattcagaataataacgactctagagatgggagatttttcatatcctccttagtttactcatctttttagaaagytctttcttttctttcctcgtcttggtcttagggacattctgcacagagaacaatatttatctgccataattatagtggaaattcttgaaattagaagaga

SEQ ID NO: 52279 - DNA, 201 bp, Homo sapiens
gagaccttagggaggcagctttgttgccatgtggcttatcacattgtccatggaggaagtaatgttcctcctttaagtggtgtagcctgagagaaagatgkcctccaagatctttaattaaataccagttgaacagaaagaactagagcactgtattaattctgtcaaacatcactattttagaacattgaggacaactaa

SEQ ID NO: 52280 - DNA, 201 bp, Homo sapiens
tcttttctttcctcgtcttggtcttagggacattctgcacagagaacaatatttatctgccataattatagtggaaattcttgaaattagaagagattatrtttgaagaaaaccaacattgtacttttcaactattaatagcagcagctttcaaactttttgctttcaagacaactttatattcttaaattatcaaggacc

SEQ ID NO: 52281 - DNA, 201 bp, Homo sapiens
attttattcaaatgagttagttgaaaaaccaggtttaatgcctgtgggaagttagttgaaaaccaggtttaatgcctcttttacatgcatttctaaactcygcagaacttggattttgctaattttaacaccctaaaatattgttaactttgcactaaagaagtgtgtgaagagactaaaggcttttctgactcttgcagt

SEQ ID NO: 52282 - DNA, 201 bp, Homo sapiens
ggggttggtggctcacaccgataatcccagcactttgggaggcctggtcgggggatcacttgagtccgggagttctagaccaacctgggcaacatttcgaraccccgtctctataaacaaacaaacaaacatgtaaaattagccaagcatggtggcacgcaactatagtccccgtctattccggaggctgaggtgggagga

SEQ ID NO: 52283 - DNA, 201 bp, Homo sapiens
taaacccaacagcattgttttcacatcacaaatgattcaaatgagacttgacttcaaagtacaaattaccaaataggcattcttatattacatataatgcyctagtatccttgcaatgactctgttagccaggaaatttaggtattgatttacttaaaaaaacaaagaacaacaacaaacaagtctccacataattagcat

SEQ ID NO: 52284 - DNA, 201 bp, Homo sapiens
gagcccaggagtttcaggctgcagtgagtcatggtcacaccaccacactcaggcctgggcaacagagtgagacctgtctgaaagcatacaaaacaaaacargactgacttcctttgggctgtgtacaatatttagaatagaggagaaaatgttggtcagagaaaggggaaaaggaaaaaaaagatgaaaggaacgcagctt

SEQ ID NO: 52285 - DNA, 201 bp, Homo sapiens
tccccactgtttataagaatctaatgcctgatgatctgaggtggaacagtttcatcttgaaaccatctccaccccgctactccatgcaaaaattatcttcyatgaaaccagtctctggtgccaaaaaggttggggactgctgctctaaagaaacctaattattaaatgtgtgttgacatttaggtattggtaactaaatat

SEQ ID NO: 52286 - DNA, 201 bp, Homo sapiens
ggtacagtgcattgtctgagattgtattttcccttagctaattgataaaataattcaagaatagaaccatggggtaattttcttatcattggaaaactacrattttctctaaaggcctaagggttgcctctggcaaacattaatagctgatctttccacaagctagcttcaagtccttaaaagacttttagcaccaggttg

SEQ ID NO: 52287 - DNA, 201 bp, Homo sapiens
taaagaattgcatctctgcagcacccaccacagactggccccaggaacatttgtcttcctttgattgccctttgctaagcccctgtcaacaatgggttttmactatcttatcttggccttaacaaggtgacagacctggtcagtggaacctggcagcaggtttctaatgtttgaaaggtaactgatggattagccttgttt

SEQ ID NO: 52288 - DNA, 201 bp, Homo sapiens
tataatttacatgtatccagcaattcatccactgcaagtgttcagttggaaggttttgagtcaatgcactcagatgttgcagccatcaccacagtccggcrttaggacattttcatgtcttcacagagtctttcatgcccatttccaatctctgttctcctctcctgccccaggaggtgatctgctttctctacatacagt

SEQ ID NO: 52289 - DNA, 201 bp, Homo sapiens
ccaaatttatttgacactgttcgtaagtggacagatacttaaggcaggtgtttgatagaggagattgtaaagaaagagatgatacagaaatgaagtaattyattggattgatcattgtaattgctgttagtctaaaaatgaaatatattgggcaattacgaagcagaaatttctgtcatcttttcaacatcattatgagct

SEQ ID NO: 52290 - DNA, 201 bp, Homo sapiens
ctaatgatcagtgatgttgagcttttatatctatatttgctggccgcacgaatgtcttctttttagaactgtctgttcatgtctttgttcaccttttaatgttttttttcttgtaaatttatttaaactctttgtaaactctggatatgagacctttgtcagcacatcggactcattttaaataaatttatgattttgtat

SEQ ID NO: 52291 - DNA, 201 bp, Homo sapiens
agaacaatacagatctagagcttgggctcgaattccccataccacatcatttcttccactccacagtgacaccaacctcatcctgcttgagctctctgacycctcttattagggctaccccctctctattttgcccatttttaattaaaatgttataggacacacacacacagacacacacacacacacacacacacacac

SEQ ID NO: 52292 - DNA, 201 bp, Homo sapiens
cccagaaagaaacaagaccttgtcctggaaaccacaacaaaaccatcaaaatcattgatcatcactaccatctaatcgtcagagctcattcaagtttccargttgtcccgataatgtccttttcagcaaaaggattccatttagaatcacactttgcattttattgtctcatctttttggtctcccacagtctggaacagt

SEQ ID NO: 52293 - DNA, 201 bp, Homo sapiens
agtgagccgagatcgcgccactgcactccagcctgggcaacagagcgagactctgtctcaaaaaaaaaaaaaaaaaagtcatatacaatttaaacttagtytggtgaccacagaaagctattttcttagttttaaaccttttattagtataacctctcttcatcttggttactttaatgtaaaatgagaattatacagact

SEQ ID NO: 52294 - DNA, 201 bp, Homo sapiens
aatgtcttgatttgaaaatgagatacataaagttcctttttatctaagacagtgtgaagtatacctgaaacattcaggcagtcttaaaagtcttcctgccwgtgacagctctaccttctagtgtagggatcagctgccatctgcatttggatcagtctgtcatcagagtccgtggacagactcagccaggccacctggttt

SEQ ID NO: 52295 - DNA, 201 bp, Homo sapiens
tgaacttaggattacttcagagatgagtgggagcatctcagatgaatgatggtgtcctccaagcgccttccagagtgtatacacatagaaagggaatgtgktgatcctccaagcgccttccagagtgtacacacatagaaagggaatgtggtgtcctttgagcacctttcagagtgtatacacatagaaagggaatgtggt

SEQ ID NO: 52296 - DNA, 201 bp, Homo sapiens
ttttaaagaaatagtgtcttattctgtcacgcaggctagaatgcggtgtacagtaactcagtcatagctcactgtaacctcaaactcctgggctccagtgrtcctcccacctcagccttccaaagtgctaggattacaggctagccaccgtacccagccccatcttcagttttcttagagcccattatactacattatctt

SEQ ID NO: 52297 - DNA, 201 bp, Homo sapiens; identical to SEQ ID NO: 9143

SEQ ID NO: 52298 - DNA, 201 bp, Homo sapiens
ttttcgttcttgaagttaaaaattgttttcatatgtaagaaatgattttcaacctgagaaagctgattgccaaaaaatggattattaagagatgattattmttaatatctgtcatctactttctctgtgaagataggaaataaatggtagagaggtaaataaatggtaaaatacagtgttagagctcctttacaaggaaac

SEQ ID NO: 52299 - DNA, 201 bp, Homo sapiens
tgcagtaaaggccaataatttgtttgtctgtttctattttattttttttagtaactcacttttattgtctttttaaaaagctatatgacagaagtttttarcaagactacaaaatctaagtccacatctttcatcattaaatttaattataacttttatagaacatgccatcaaattattttgtcatgttctataaaagtt

SEQ ID NO: 52300 - DNA, 201 bp, Homo sapiens
aaggctgctgtgaacttttttgggtcttttggtagaaataagccttcatttctcatgagtacagtgtaagcatgggagtggaactgctgggtggtgggatrtgcatgtgtttagagtaataggtacttacagtgcttttaagaatatttaggaaatgtcaatcagtgtgtcttttgttaatggtaggttttataattagag

SEQ ID NO: 52301 - DNA, 201 bp, Homo sapiens
tttccccctaaattgtctatgttctattctatgattataccaccatttatccattccactgtaagtggacatttagttttctttcgagtttgtgtctgcarataaggctgctgtgaacttttttgggtcttttggtagaaataagccttcatttctcatgagtacagtgtaagcatgggagtggaactgctgggtggtggg

SEQ ID NO: 52302 - DNA, 201 bp, Homo sapiens
tcagatccttcccggggatgatgcagattggctgacagactccgctggagacttcgcagtgacaaagcagccgaggattaaccctgctcctgggtcctacktctgtccagggagctgagcggggcgctcctcaggtctccttcctagttttcctcccagagtcgctccacacgagtgctgggcgcctactacgtgctgggc

SEQ ID NO: 52303 - DNA, 201 bp, Homo sapiens
aactctcattcatattgtttaaaggttaagtgaaatttgcaatacacaatacagccattacataacaggcacagaatacagtttcatgacttggatagttyttgttttttaagcgcattagcaacttcatttccaaatgctatcaaattcttcaggatatgaaaacctacatataagaatggagtgcctcatcggctcatt

SEQ ID NO: 52304 - DNA, 201 bp, Homo sapiens
ctttaagttatttaatatgtacagttatgagacttgttttttcaacttatattggttttttgaaatttatttatactgctgtatgtaggtatagttcattwatttccactcctgggcaatattccattgtgtgtatttatttcttcccctctgtgtggacatttggatggttgctgggtcctttcgtttgtttgttattgt

SEQ ID NO: 52305 - DNA, 201 bp, Homo sapiens
atcactgtaaatttttaaactagaaaatagtttgtgcagtattcaaaattaatgttgactatatgtatatacatacacacttcattttaggataagacttyatcagaaggcttttatccagtttttaatgggtgtggtttattttaaataaaagaaaaaggagtttaataattttccaaaaatgaatgtgtatgtatatac

SEQ ID NO: 52306 - DNA, 201 bp, Homo sapiens; identical to SEQ ID NO: 9152

SEQ ID NO: 52307 - DNA, 201 bp, Homo sapiens
ggctgcttgggagactgaggtgggagaatcccttgagtccaggaggctgaggctgcagtgagctgtgatctcaccactgcagtccagcctgggcaatagartgagaacttgtctcaaaaaaaaaaaaaaaattatgcgagctgattttcacttaagacgataatactgaaatcaaaatttagtacttcttggtatcctgaa

SEQ ID NO: 52308 - DNA, 201 bp, Homo sapiens
tcccggctgcttgggagactgaggtgggagaatcccttgagtccaggaggctgaggctgcagtgagctgtgatctcaccactgcagtccagcctgggcaayagagtgagaacttgtctcaaaaaaaaaaaaaaaattatgcgagctgattttcacttaagacgataatactgaaatcaaaatttagtacttcttggtatcc

SEQ ID NO: 52309 - DNA, 201 bp, Homo sapiens
atagtattttcatacagttagttattcattaggaaagactgcattgctcggtattcaacactcaagtgttttgtggcaaaaacttcaatggctctgttttyttcaaagggtgtgtgacagtattctttcatcttttatgatttttggaacaccaaatttatttgacactgttcgtaagtggacagatacttaaggcaggtg

SEQ ID NO: 52310 - DNA, 201 bp, Homo sapiens
ttgaaaattgttgtggaagactatggataaattataaaacttcttttgttgaagcagtgacttacaagttaagtctgtgtttttgggaacaagtgacccarggcattgcagagcatactactaatttcagtttcagatgggtcaaaagcttggaattatgagagagcattatctattcagggaactgcaagttaagttaat

SEQ ID NO: 52311 - DNA, 201 bp, Homo sapiens; identical to SEQ ID NO: 9154

SEQ ID NO: 52312 - DNA, 201 bp, Homo sapiens; identical to SEQ ID NO: 9155

SEQ ID NO: 52313 - DNA, 201 bp, Homo sapiens
gaagaagattattgttaattgcacagattctattgcagaccaatgctagaagacaatgacatagaagtaattttaaatcagagtggcttaggatatatgargttaaaggaatttggcttttaattttaaaacgtaaagaatgtaagaaactcaaaagctcatgttctaactgttgtttgggaaaagcagtaatagtttggt

SEQ ID NO: 52314 - DNA, 201 bp, Homo sapiens; identical to SEQ ID NO: 9158

SEQ ID NO: 52315 - DNA, 201 bp, Homo sapiens
agatcagagggaagaagattattgttaattgcacagattctattgcagaccaatgctagaagacaatgacatagaagtaattttaaatcagagtggcttargatatatgaggttaaaggaatttggcttttaattttaaaacgtaaagaatgtaagaaactcaaaagctcatgttctaactgttgtttgggaaaagcagta

SEQ ID NO: 52316 - DNA, 201 bp, Homo sapiens
taccgcctgagctccgcctcctgtcacatcggtggcagcattagattctcatagaagtgcgaaccctagtgtaaactgcacatgtgagggatctaggttcyccactgtttataagaatctaatgcctgatgatctgaggtggaacagtttcatcttgaaaccatctccaccccgctactccatgcaaaaattatcttccat

SEQ ID NO: 52317 - DNA, 201 bp, Homo sapiens
tcatcaccaatcattccatattcaaacattcccaaataagaactcactatttcctgagtgctcctgctttcttggcatcagtgccttcagtcacgtaacaytctctgcctaaaatacctccttcctttgctcattctgaacctagtaaactattcatctttaaaactttaacacatttacttcctcaaagaagccctccct

SEQ ID NO: 52318 - DNA, 201 bp, Homo sapiens
aagaagtagagacatgcggcaacctaatagttgacagcagcaaatgaaacgagaagcacgtagagcccttaggtacaactggccttacctgacctagggtracccttcttcccactcaacttcactaatgaactttgcaggcagtgtgatggctacttattattagatgctatgtccatttattattataaatacaggcat

SEQ ID NO: 52319 - DNA, 201 bp, Homo sapiens
ctttggcgtcttttactatagattagttttgcctgttttaaactatataaagttggaaccatgtcgtatgaactcatcagtgtctttttttatcaacattrtgtctgtaagagtcatccatgttgtgtatgttatttgttttttccccctaaattgtctatgttctattctatgattataccaccatttatccattccact

SEQ ID NO: 52320 - DNA, 201 bp, Homo sapiens
ttgcttggcacttcttcctgctgccttgtgaagaaggtgccttgctttcccctcaccttctgccatgattttaagtttcctgagacctccccaacaatgcrgaactctgagtcaatgaaacctctttcctttataaattacccagtctcgggcattttttcatagctgtgtgagaacggactaatagacagccttattgct

SEQ ID NO: 52321 - DNA, 201 bp, Homo sapiens
aatgaaacttcaggcatattcttttattgtcttattattccctgctgtgaaatgtcaacacttgaatgtttcttttattcctttttaaatgttttttccartgactttttaattgataatagaggattcactgttgtcttcttaaatgaaacttcgggacccatacctaaaatgttacttttcctttctttttatgtgaaa

SEQ ID NO: 52322 - DNA, 201 bp, Homo sapiens
ttttatttatattgagcatgcagtatttacaagttacttttcttcctaggtatgctttgctgttggatattttttaaatgttgttttctgtttgttactgstgtacaaaaatacagttgattttatttaaaaaaagtattctaatatttagccagaattaattgaatattaacaaactgttctgataaatgtgacataact

SEQ ID NO: 52323 - DNA, 201 bp, Homo sapiens
aagaaagccagaaagaactttctcaaaagagagaaccactcacacagacgcccaaagaccggagagcactgttggtgttctgggatccagagaagtctgtrtagctggagagctgtactgtccaatgaagaagctacgagccacaagccacatgcagctttccggaatggaggtagtctgtaggtgtaaaatacacaccaa

SEQ ID NO: 52324 - DNA, 201 bp, Homo sapiens
caccggagtcatcctctaaagcctcctgagtctccccaacctgggtctgtatctgactatgagtggcaggtgccatgccaaggagcatgtgtcactgtccytgctgcacaggcagaacgtgccctaaacctggacaacagcagaactggttctcagattagcatttactggctattgttcctgagattagtacttcaaaca

SEQ ID NO: 52325 - DNA, 201 bp, Homo sapiens
aaaagttgttctgaaacatttttggtccaacaattgaaatcacaaaagccctgacccacattccctagaccgctaatctgcctctgtctcctcagcacacyggagtcatcctctaaagcctcctgagtctccccaacctgggtctgtatctgactatgagtggcaggtgccatgccaaggagcatgtgtcactgtccctgc

SEQ ID NO: 52326 - DNA, 201 bp, Homo sapiens
ttaatgttctttattgttaagagaaaagttgttctgaaacatttttggtccaacaattgaaatcacaaaagccctgacccacattccctagaccgctaatytgcctctgtctcctcagcacaccggagtcatcctctaaagcctcctgagtctccccaacctgggtctgtatctgactatgagtggcaggtgccatgccaa

SEQ ID NO: 52327 - DNA, 201 bp, Homo sapiens
agcatattgaaagaatattctttctttcacttgtgtcacttcctaggagtattcctacagtatacgtatttctggggggcagtgagcgggaggacatcttrcttggtaaatcagttttgctaattattttgtagcaaacccatctttatagttagactttttggggggtgaggggaatagtttaagttttttattttaaaa

SEQ ID NO: 52328 - DNA, 201 bp, Homo sapiens
gccacaaatccttagattgtaaaaaaaaaaacaaaaaaaaaacaaaaaaaaaccccacaataatggcaaagtacaatgaagcaaagcacaataaaatgacrtgtgaccgtacagttttgtaagcaagatgattgaaagatctactgagtgccgtggagtcacagagaggaacaactaccctcaggctatggagttcagtga

SEQ ID NO: 52329 - DNA, 201 bp, Homo sapiens
tactgatagcctactgttgaccagaagcctcaccaataacattaaaacagttgattgacatgtattttatatgttataggtattatatactgtattcttawgataaagttagctagaggaaagatgtctgaagaaaactataaggaagagaaaatatattcactctttgctaagtggaagtagatcataataaaggtttta

SEQ ID NO: 52330 - DNA, 201 bp, Homo sapiens
ccaaaggccccacctccaaattaccctcacattgcaaatatggtttcaatttatgaattttggggagacacaacattcaggccatagcatacctcatagaycacatatggatatgccagccaatttgactaatgtcagtggtgaacatagtcttcttgatctatatccaaggcatccttcttaatattcgaccttatacct

SEQ ID NO: 52331 - DNA, 201 bp, Homo sapiens
ctaatcataaataggtatgtactgtctgtcatgtaatagttttctggagctttaaaaattgtaggtaaaattaactttatttaacaattttccagtgtcastattttcaagacagagtgaagtacagcatccagaaatgtattgtgtttttgaaatagaaattgtttggcagtttagctctttctctagctcctttgtcta

SEQ ID NO: 52332 - DNA, 201 bp, Homo sapiens
ccttccctcccttccttctttccactttcaatacatagggctggggtagcaaaaaaaaataataatagtaaacagttttgtaaaacttgataatagaattmtctgacagggttaatagttgtgtttgaaattcagagctagtatggttcactctccccagaaaataaaattttaatttcttacacctcagggaataaaaac

SEQ ID NO: 52333 - DNA, 201 bp, Homo sapiens
tatatgatgtgaaggagtccaatttcattcttctgcatgtagatatcatagcaccatgtgttgaaaagatgattctttccaccattgaattgcatgcaatygtgtgtgtgtgtgtgtgtgtgtgtgtgttcaaattctttgtgaaaagaaaaattacacgagattttcatgtttcttaaactaatctaaaacagataggtc

SEQ ID NO: 52334 - DNA, 201 bp, Homo sapiens
tgcctctttaactttgtgtcacttagcaaaaatatctttaaggatggaaagaagagaccccatgtgtcttaaattccaagtcactgtgtgactaagctcgragttccaataaatattaaactagaattctgctgggaatttgagtcatccgcttaagctactcctgggaccaagacaactctggttgacctgatgttgatg

SEQ ID NO: 52335 - DNA, 201 bp, Homo sapiens
cagttttaagatagattgttcttgaagataatggggcaaataattacctgctaaacaaattatgagtcctgtgattctttttttggttgaaataatttcargaactccagcatatgttgcagttttggctagaaaggtgattgtgacatacatccattcatccattctccctctctccttccctccttccctcccttcctt

SEQ ID NO: 52336 - DNA, 201 bp, Homo sapiens
atctccatggtccaaaacctggttaagaagtaagaggaatgtatttaaaagatagacttgagtagtccaaatatctttcccaaagtctatgcactaaggtstgtgtgcgccctactccttggtgagcccattagtcccttacccagaacctattaagtttactttagacagaattgtgacaagtgaggctatctggattcc

SEQ ID NO: 52337 - DNA, 201 bp, Homo sapiens
cccaccatatgtctgcagtactcagtctgaaaagctaacaaatactgcatctaaccactcaatggaccttacaaaaagcaaagacccaccaggagagaaaccagcccaaaatgaaggtgcacagaactctgcaacgtttagtgccagtaagctgttacaaaatttagcacaatgtggaatgcagtcatccatgtcagtgga

SEQ ID NO: 52338 - DNA, 201 bp, Homo sapiens; identical to SEQ ID NO: 9144

SEQ ID NO: 52339 - DNA, 201 bp, Homo sapiens; identical to SEQ ID NO: 9146

SEQ ID NO: 52340 - DNA, 201 bp, Homo sapiens; identical to SEQ ID NO: 9148

SEQ ID NO: 52341 - DNA, 201 bp, Homo sapiens; identical to SEQ ID NO: 9149

SEQ ID NO: 52342 - DNA, 201 bp, Homo sapiens
gaagtcattttatttgtggatactcagtaaggtcattcctagttttgccctgtcaattttccccctaccccggctttcaagtcctctttatgatttgtgtrccttctaatacttcttctacggtgattcgcccaactctagaggtttggtcgtttaaaaaagtttcacaaaatgaagttgatgtgttattttgcaggattg

SEQ ID NO: 52343 - DNA, 201 bp, Homo sapiens; identical to SEQ ID NO: 9150

SEQ ID NO: 52344 - DNA, 201 bp, Homo sapiens
agtaaactattcatctttaaaactttaacacatttacttcctcaaagaagccctccctccctaattcactattgtaggacggagtgtgtttctcagccctytgcaataccaaatgcttattgcacttattacaatggttaacaacatactttgtaactttgcattccttttaaagacaataaagtgtatcttcttaatctt

SEQ ID NO: 52345 - DNA, 201 bp, Homo sapiens
gcattccttttaaagacaataaagtgtatcttcttaatcttacattcagtgagtgcccagtatatatctctttttttttttttttctttttgagaaagagwcttgctctgtcccctagcctggagtgcagtggtgcgatcttggctcactgcaacttccgcctcccgggttcaagcccgtctcctgcctcagcccctccag

SEQ ID NO: 52346 - DNA, 201 bp, Homo sapiens
ataaagtgtatcttcttaatcttacattcagtgagtgcccagtatatatctctttttttttttttttctttttgagaaagagtcttgctctgtcccctagsctggagtgcagtggtgcgatcttggctcactgcaacttccgcctcccgggttcaagcccgtctcctgcctcagcccctccagtagctgggattacaggcg

SEQ ID NO: 52347 - DNA, 201 bp, Homo sapiens
gaattaattacctagattattaaattattttacagatccaaatgctttttctttagtttttcaggatatatatatatatatacacacacacacacacacayatatatatactatctatctatattatctatctatctgtctgtctatctatctatctatctatctatctatctaaagacaaaagacaatcctaagcctcaa

SEQ ID NO: 52348 - DNA, 201 bp, Homo sapiens
tcacacaaaattatgagtgaaagaattaattacctagattattaaattattttacagatccaaatgctttttctttagtttttcaggatatatatatatayatacacacacacacacacacatatatatatactatctatctatattatctatctatctgtctgtctatctatctatctatctatctatctatctaaagac

SEQ ID NO: 52349 - DNA, 201 bp, Homo sapiens
tttacaaactgaaggtttgtggcagccctgcattgagcaagtaccattttttcaacagcatgttttcagtttgtgtctttgtggtcatgttttgataattmtcacaatatataaaactttttcatattattatatgtgtcatggtgatctgtaatcagtgatctttgatgttactattgtgattgttttgaggtaccatga

SEQ ID NO: 52350 - DNA, 201 bp, Homo sapiens
tactaacattaataggagtttgaaagaagctgcttccaccccttatggataactttggcgggttgaagacatcagtggaggaagtaagtggaggaagtaastgcagatgtggtggaaattgcaagaaaactagaattagaagtggagcctgaagatgtgactgaatttgtataatctcatgagaaaacatggacggatgag

SEQ ID NO: 52351 - DNA, 201 bp, Homo sapiens
cagaataagaagaagtagtgagcagctttgggaagtcacctaacatacagcagtggactttttaacaacaatgttggagggctggaatattctcggcttgytgggcaatctccatggtccaaaacctggttaagaagtaagaggaatgtatttaaaagatagacttgagtagtccaaatatctttcccaaagtctatgcac

SEQ ID NO: 52352 - DNA, 201 bp, Homo sapiens
agagacagtgaaataatagactttttaaacaaatggtgtttcatctgcctggcccctaagtgtcggttgccgcctggagtatgttgaagtgtttttcaccytccaagtaagtgagttgctctggttttgcccggcagttcggtaacgtcgatagggtttatttggttcagggagcactggcttcatcacctacagtaactt

SEQ ID NO: 52353 - DNA, 201 bp, Homo sapiens
aaacagaataagaagaagtagtgagcagctttgggaagtcacctaacatacagcagtggactttttaacaacaatgttggagggctggaatattctcggcytgctgggcaatctccatggtccaaaacctggttaagaagtaagaggaatgtatttaaaagatagacttgagtagtccaaatatctttcccaaagtctatg

SEQ ID NO: 52354 - DNA, 201 bp, Homo sapiens
ataaccaaatagaacataaatcaaagcaaactcatacacacagaattttcaattgctccctatggatgtggactcagtagacttccatgccaagaatgggkgacaacatatttagtattatgaagaaaggtattaaaatttgagaagaaaactttacataaaattacagtggccaggcatagtggttcacccctgtaagcc

SEQ ID NO: 52355 - DNA, 201 bp, Homo sapiens
tccctaaggctcagtgttctcatctgtaaaatggaaataaattcatagagttatttgagaattaccatataggaattaagcctacgttaagcatttaacgyagtcctggcacatagtatgcagtatttttttttttttttttttgagacagagtctcgctctgtcgcccaagctggggtgcagtggagcaatctgggctca

SEQ ID NO: 52356 - DNA, 201 bp, Homo sapiens; identical to SEQ ID NO: 9171

SEQ ID NO: 52357 - DNA, 201 bp, Homo sapiens
agggttgcctctggcaaacattaatagctgatctttccacaagctagcttcaagtccttaaaagacttttagcaccaggttggatgtgctagctagcctcrttacattttacatcgtacctggccattttgcttctctgcccatgtcttctgagttttcttatgttcttgtttgattcacagtggtgtctttgagtatata

SEQ ID NO: 52358 - DNA, 201 bp, Homo sapiens
gtgtatatgagacagagtgtcgcccaggctggagtgcagtgatgcgttctcagctcactgcaacctccgcctcctgggttcaagcaattctcctgcttcarcctccctagtagctgggattacaggtgactgccaccacacccagctaatttttgtattttagtagagacggggtttcaccatgttggccaggctggtctc

SEQ ID NO: 52359 - DNA, 201 bp, Homo sapiens
cagattgcatagttcaatcactagggtgatgaaaaataattgttttaaaatgtgccattgccactaaggaaaacattggcactatgtgcccggcactgtgmtgggtgctgaatttattaagcattaatttgaaaaattgctttcactttcaagactgtgacagtattctaaaactctcattcatattgtttaaaggttaag

SEQ ID NO: 52360 - DNA, 201 bp, Homo sapiens
cctcccctccctttctttctttctctctctctctcccttccttccttcctttttttttttttttttaaagaaatagtgtcttattctgtcacgcaggctaraatgcggtgtacagtaactcagtcatagctcactgtaacctcaaactcctgggctccagtgatcctcccacctcagccttccaaagtgctaggattacag

SEQ ID NO: 52361 - DNA, 201 bp, Homo sapiens
ccacatggtattttctgttttctactctgccatcttgagtgacttggtgatgtcactcctcatggttgaaagatggctattttcccacatttccttgtcarcttcactggtcataattaaatcatatacccatgcctaagccctgcctcttactatcagagtagacattatttgtcacaagtggctttacttaattgggat

SEQ ID NO: 52362 - DNA, 201 bp, Homo sapiens
gagaaagtgtttctttaaagctgcagtggcctttccctgtgtccataaaaatctgggcttttgtccatagagctctttgctcttttctgcttttctaaggrcagttgacaacaatgtcggggcaggggggaagcttccattccccacccccaacaacatccacaaagagatttttatctcctaagtggagtcaagaatggg

SEQ ID NO: 52363 - DNA, 201 bp, Homo sapiens
actaaagtatgggaataataccagtgggttcaatgctgtaacacacactgatcaataagctttagatctctagcgaaggcctttctctcccttttccctgrttgctttcctataacaaataaatactttttctcacaagaccatacctttgagtttgctacctacttccattacatttccgaccccacttcaacagagaaa

SEQ ID NO: 52364 - DNA, 201 bp, Homo sapiens
agctatgtgaatgatgccacacaatagagccgcagtgcaggtacagtgcattgtctgagattgtattttcccttagctaattgataaaataattcaagaayagaaccatggggtaattttcttatcattggaaaactacaattttctctaaaggcctaagggttgcctctggcaaacattaatagctgatctttccacaag

SEQ ID NO: 52365 - DNA, 201 bp, Homo sapiens
cagagatagcaaatgggttataaaggggattaagcatcagacaggatgattgattaggcagatgacttttcaactgcctcccaacctttaaattatgattytgtcatgtttggagaattactttacatgccatgctattatgaaaacagtagccagtggcaaaattattagaggaaaatagatttcacctcataaaaatta

SEQ ID NO: 52366 - DNA, 201 bp, Homo sapiens
gatgttgtgttagcaggcataaaaacaacattaatctccttgtacaactgcagcagagctcttagtgtacaggtacatggcctgtaatattttgaaaggartttttgtttttgtccagtaggtcccaacagcgggcttaaaatattcagcaaatcatggtgtaaacagatgtgctttcctccaggctttgttgttccattt

SEQ ID NO: 52367 - DNA, 201 bp, Homo sapiens
acaacttcctttagtgaggaactgaggaagaagacttttttacccccctttttcttctttgggggggctctgtgaatttttgctgtaggaaataatcccargatttctggtgtgtgtgatgacaaggtcatctcttaattagaacacatgtaaagaacaaagctaaatggcttcaaaacagctttgtagttgatggagagg

SEQ ID NO: 52368 - DNA, 201 bp, Homo sapiens
agcattaatttgaaaaattgctttcactttcaagactgtgacagtattctaaaactctcattcatattgtttaaaggttaagtgaaatttgcaatacacartacagccattacataacaggcacagaatacagtttcatgacttggatagttcttgttttttaagcgcattagcaacttcatttccaaatgctatcaaatt

SEQ ID NO: 52369 - DNA, 201 bp, Homo sapiens
tttttaaagaaatagtgtcttattctgtcacgcaggctagaatgcggtgtacagtaactcagtcatagctcactgtaacctcaaactcctgggctccagtsatcctcccacctcagccttccaaagtgctaggattacaggctagccaccgtacccagccccatcttcagttttcttagagcccattatactacattatct

SEQ ID NO: 52370 - DNA, 201 bp, Homo sapiens; identical to SEQ ID NO: 9160

SEQ ID NO: 52371 - DNA, 201 bp, Homo sapiens
tactccatgcaaaaattatcttccatgaaaccagtctctggtgccaaaaaggttggggactgctgctctaaagaaacctaattattaaatgtgtgttgacwtttaggtattggtaactaaatatactcaagaatacacctggcaacattcttaagttatatttatataaaaccaggcaagagaactatatgttggaatttc

SEQ ID NO: 52372 - DNA, 201 bp, Homo sapiens; identical to SEQ ID NO: 9161

SEQ ID NO: 52373 - DNA, 201 bp, Homo sapiens
tcctttggttcttctcatccgccataagccaaattctagaaaagttctgttttctttacttagaagttatttaacaagtatataccatacaagtaaagtcyctcccttactgtgatgcaaatgtttaataactttaaatagacacatgcacaagctctaatgaaatcaccatcaaaattaagaaaataacaaaccagagga

SEQ ID NO: 52374 - DNA, 201 bp, Homo sapiens
cgtggatgtattctgcagaccctcccatcccttccaaagtagtttcccaattttgatcaggagttggtgttcagtcagaaggaacaaaggaaccaactgtrtcttagaggcggacaggctgggagtctgtgacacatgttgatctctgaagcattccaggagtttctaccttttatcacgtcaataattggctgctgaagg

SEQ ID NO: 52375 - DNA, 201 bp, Homo sapiens
atggctctgttttcttcaaagggtgtgtgacagtattctttcatcttttatgatttttggaacaccaaatttatttgacactgttcgtaagtggacagatrcttaaggcaggtgtttgatagaggagattgtaaagaaagagatgatacagaaatgaagtaattcattggattgatcattgtaattgctgttagtctaaaa

SEQ ID NO: 52376 - DNA, 201 bp, Homo sapiens; identical to SEQ ID NO: 9162

SEQ ID NO: 52377 - DNA, 201 bp, Homo sapiens
aatactttacatgtgaatgattatggtgctattgattatataagcaataccactgactgttgtcttcagatacatcctagatgaatgtttccttccttccrtccattcgtccttcctgttctttctttccacagggtcttgctctgtcacccaggctaaagtgcacaggtgctatcatggcttactgcagccttgacttcc

SEQ ID NO: 52378 - DNA, 201 bp, Homo sapiens; identical to SEQ ID NO: 9164

SEQ ID NO: 52379 - DNA, 201 bp, Homo sapiens; identical to SEQ ID NO: 9165

SEQ ID NO: 52380 - DNA, 201 bp, Homo sapiens; identical to SEQ ID NO: 9166

SEQ ID NO: 52381 - DNA, 201 bp, Homo sapiens; identical to SEQ ID NO: 9168

SEQ ID NO: 52382 - DNA, 201 bp, Homo sapiens
agctgacgagcaagttaaagccaatggacctagaagttaggagcaaatttggccttgggccaaaaaattaagtccttcaggttgcagtggagagcagcctsggcagctgttttcgtcaccggtgtctctggtgtccatgccacctgtctctgaggagtatctgcacctaaaatgagaacccctgggagagagcaagaaact

SEQ ID NO: 52383 - DNA, 201 bp, Homo sapiens
ttgacaaattacttggaatcataggaataaaattttagatttagaggggtcctcatatacatgtgtccttgcgttgaatgcttgagttactcccgcaggartgtctctaatgagtcttttttagttgggaatgtgaatgacactattttactcctatggaagcagctgacgagcaagttaaagccaatggacctagaagtt

SEQ ID NO: 52384 - DNA, 201 bp, Homo sapiens
tgggagaatggatatttggtggcagtcatgataaccatttcatttctatatcattattaacctcttaaaatatccatcttaagtacattatggcaaagctkcttaaaatggtggcattggaatctcaagaaagtctcttctcatcctactccttacacagttgaaattaattgttgctgcctcctttctgtatctttttct

SEQ ID NO: 52385 - DNA, 201 bp, Homo sapiens
ttcagctgagaaacattcacctctgagatcacatctggaaaagaaaatgacctaacgttttatagttgtcatagcccacatttttggaaagctatgtgaaygatgccacacaatagagccgcagtgcaggtacagtgcattgtctgagattgtattttcccttagctaattgataaaataattcaagaatagaaccatggg

SEQ ID NO: 52386 - DNA, 201 bp, Homo sapiens; identical to SEQ ID NO: 9169

SEQ ID NO: 52387 - DNA, 201 bp, Homo sapiens; identical to SEQ ID NO: 9170

SEQ ID NO: 52388 - DNA, 201 bp, Homo sapiens
atgtgaaggagtccaatttcattcttctgcatgtagatatcatagcaccatgtgttgaaaagatgattctttccaccattgaattgcatgcaattgtgtgygtgtgtgtgtgtgtgtgtgtgttcaaattctttgtgaaaagaaaaattacacgagattttcatgtttcttaaactaatctaaaacagataggtcagtgtc

SEQ ID NO: 52389 - DNA, 201 bp, Homo sapiens
gttaagaacctgaagtgtattgaattactccagtttacctatttctcatgttaagtaatttttgcaaaatgatcatctttcatcagacagttctgaagttygcagtaattaagtaagcaagcatttatgttagctttatttgagaccaaagtggtggtagatatgaattagcctcattctttgattgaccaagctataagt

SEQ ID NO: 52390 - DNA, 201 bp, Homo sapiens
tacaatatagatatctttttggaatcatacaatatagatatctttcgtatttagcttctttcactaagcattaagtttctgaggttcatccttggtgacgygaatcattagttcattccctttttttgttggttacactttatgcttgcctttaatagttgatgggcatttgttttgtttacagtttttggttattatgat

SEQ ID NO: 52391 - DNA, 201 bp, Homo sapiens
gccagaaagaactttctcaaaagagagaaccactcacacagacgcccaaagaccggagagcactgttggtgttctgggatccagagaagtctgtgtagctrgagagctgtactgtccaatgaagaagctacgagccacaagccacatgcagctttccggaatggaggtagtctgtaggtgtaaaatacacaccaacttgga

SEQ ID NO: 52392 - DNA, 201 bp, Homo sapiens
aatttgaaattaacaaaggttaataaacacatcctagcaactataaacctttttcacagcttattttgttgaagcagctacttttatcgattattacctaraaagcagagatctattgctttctgttaatgaaccagcattcataaacaattgatatttttctgtcaaatgactacttttgcattgaacttgaacaagaaa

SEQ ID NO: 52393 - DNA, 201 bp, Homo sapiens
tattaccaatttttttgctgcaaagattacatacttggtattttgaaactgaaaaagttccatataagaaaactatagctattcttttttttttttttaaraaatacacgtttaggaggatttataattttttgtatgtaaattaattaatttagcacagcacgctaagaaatttgaaattaacaaaggttaataaacaca

SEQ ID NO: 52394 - DNA, 201 bp, Homo sapiens
aatttgagtcatccgcttaagctactcctgggaccaagacaactctggttgacctgatgttgatgtttattcagagctttggtggaaaggagcctctcacycttggacttctaattaacaaagtcattccttagtcacttgttaagtgatagagctactccttgttttcaggcctgtaatttgctaaaggattgagcacaa

SEQ ID NO: 52395 - DNA, 201 bp, Homo sapiens
ttctgtttctccaaggcacactcccacccctgctaggcatgctattattgtctgtggtgttaggtgaatacctagaggaatgtttccattctgtaacaaarttatatgttttttttaatttgaaataaattttatgttaggtttttggctcttgtccaaggaagaacatgcagataactattctcacatgtcgacatgtta

SEQ ID NO: 52396 - DNA, 201 bp, Homo sapiens; identical to SEQ ID NO: 3160

SEQ ID NO: 52397 - DNA, 201 bp, Homo sapiens; identical to SEQ ID NO: 3161

SEQ ID NO: 52398 - DNA, 201 bp, Homo sapiens; identical to SEQ ID NO: 3162

SEQ ID NO: 52399 - DNA, 201 bp, Homo sapiens; identical to SEQ ID NO: 25411

SEQ ID NO: 52400 - DNA, 201 bp, Homo sapiens; identical to SEQ ID NO: 25232

SEQ ID NO: 52401 - DNA, 201 bp, Homo sapiens
aaacggaataaaattgtaaaaaattaattgtagttttaattccttatttatggtggtattattcacaaccaaaataagccaagcattttccttttatccaytaggtgggagtattgttgtatttgaatattttaaggtactatagttaaatttttatcttatttatttatttatttattttttgaggctgggtcttgctct

SEQ ID NO: 52402 - DNA, 201 bp, Homo sapiens; identical to SEQ ID NO: 3164

SEQ ID NO: 52403 - DNA, 201 bp, Homo sapiens; identical to SEQ ID NO: 25235

SEQ ID NO: 52404 - DNA, 201 bp, Homo sapiens; identical to SEQ ID NO: 3166

SEQ ID NO: 52405 - DNA, 201 bp, Homo sapiens; identical to SEQ ID NO: 9178

SEQ ID NO: 52406 - DNA, 201 bp, Homo sapiens; identical to SEQ ID NO: 25240

SEQ ID NO: 52407 - DNA, 201 bp, Homo sapiens; identical to SEQ ID NO: 9181

SEQ ID NO: 52408 - DNA, 201 bp, Homo sapiens
atgtttccattctgtaacaaaattatatgttttttttaatttgaaataaattttatgttaggtttttggctcttgtccaaggaagaacatgcagataactrttctcacatgtcgacatgttaccgattataaaacctcagaatccaccggcagccttccttctcctttcctgagagccctaaaaacacagaatttcaaaga

SEQ ID NO: 52409 - DNA, 201 bp, Homo sapiens; identical to SEQ ID NO: 9183

SEQ ID NO: 52410 - DNA, 201 bp, Homo sapiens; identical to SEQ ID NO: 9185

SEQ ID NO: 52411 - DNA, 201 bp, Homo sapiens; identical to SEQ ID NO: 25246

SEQ ID NO: 52412 - DNA, 201 bp, Homo sapiens; identical to SEQ ID NO: 3171

SEQ ID NO: 52413 - DNA, 201 bp, Homo sapiens
ctaatgtgtgtgctgtgtctcagtttttaacaaaaagcaaaaaacaaaacttttgaatggaaaaaagcttatggaataaggatataaagaaaaaatatttstgtacagctgtacagtgtatttgtgttttaagctaagttattagaaaagagtcaaaaagttaaaaaaataaaagtttagaaagcagaaaagttacaggaa

SEQ ID NO: 52414 - DNA, 201 bp, Homo sapiens; identical to SEQ ID NO: 25348

SEQ ID NO: 52415 - DNA, 201 bp, Homo sapiens; identical to SEQ ID NO: 25349

SEQ ID NO: 52416 - DNA, 201 bp, Homo sapiens; identical to SEQ ID NO: 25585

SEQ ID NO: 52417 - DNA, 201 bp, Homo sapiens
gctggtcttgaactcctgagctcaaatgatcctcccacttcggcctcccaaagtgttgggattacaggcgtgagccactgtgccagcctgtcatccacccttttttttttaattaaggtgttttaattcctttctctgttccagtgttgacgctgagattgtatttagcaatataagtttccccctgtttttgtagttgtt

SEQ ID NO: 52418 - DNA, 201 bp, Homo sapiens; identical to SEQ ID NO: 25462

SEQ ID NO: 52419 - DNA, 201 bp, Homo sapiens; identical to SEQ ID NO: 25258

SEQ ID NO: 52420 - DNA, 201 bp, Homo sapiens; identical to SEQ ID NO: 25463

SEQ ID NO: 52421 - DNA, 201 bp, Homo sapiens
aagtccagctccccatagccctgcttgatatggacactggtatgattgaaattggattaaatgtcattctcaccacctggctacttatgcatggaaaggargttggcagtatcatcagaaagaggagaatcagttaagatgcatgaggagagtggtgcatgtatcagcatctcagaagggagttgttctgagagaattatc

SEQ ID NO: 52422 - DNA, 201 bp, Homo sapiens; identical to SEQ ID NO: 25260

SEQ ID NO: 52423 - DNA, 201 bp, Homo sapiens; identical to SEQ ID NO: 25356

SEQ ID NO: 52424 - DNA, 201 bp, Homo sapiens; identical to SEQ ID NO: 25264

SEQ ID NO: 52425 - DNA, 201 bp, Homo sapiens; identical to SEQ ID NO: 25358

SEQ ID NO: 52426 - DNA, 201 bp, Homo sapiens; identical to SEQ ID NO: 25266

SEQ ID NO: 52427 - DNA, 201 bp, Homo sapiens
ctgggagaaccctagaagcagataactctgggcattgtagtttttaataattttggtaaggaaagaatcataattgcttcagactgtccaggagtaaaccycttcttgtgataagaagcaggcagcaggtgcaggaggttggctgtcagtgcagcagagccacgttagggccagataccaagccaggcacagcggtgctta

SEQ ID NO: 52428 - DNA, 201 bp, Homo sapiens; identical to SEQ ID NO: 25359

SEQ ID NO: 52429 - DNA, 201 bp, Homo sapiens; identical to SEQ ID NO: 25360

SEQ ID NO: 52430 - DNA, 201 bp, Homo sapiens
aggctggtcttaaactcctgagctgaagcgatccacctacctcagcctttcgaagtgccggtattacaggcatgaaccactgtgaccagcactccctgttkttgttttttggcttatgaatttttctgtttattatgaaaatgtaagagtgagatgttaatacatttcaatttagttctgtaatatcaggaatttttcaaa

SEQ ID NO: 52431 - DNA, 201 bp, Homo sapiens; identical to SEQ ID NO: 25361

SEQ ID NO: 52432 - DNA, 201 bp, Homo sapiens
cagtggggcaaacatggctcactgcagccttgaccgctcaggctcaagcagtcctctcacctcagacccccaagtagctgggaccacaggtgcatgccacsacacccggctaatttttgtatttttcagagagacaggatttcattatgttgtccaggctggtcttaaactcctgagctgaagcgatccacctacctcagc

SEQ ID NO: 52433 - DNA, 201 bp, Homo sapiens; identical to SEQ ID NO: 25362

SEQ ID NO: 52434 - DNA, 201 bp, Homo sapiens; identical to SEQ ID NO: 25466

SEQ ID NO: 52435 - DNA, 201 bp, Homo sapiens; identical to SEQ ID NO: 25363

SEQ ID NO: 52436 - DNA, 201 bp, Homo sapiens
ggctggtcttgaactcctgagctcaaatgatcctcccacttcggcctcccaaagtgttgggattacaggcgtgagccactgtgccagcctgtcatccaccyttttttttttaattaaggtgttttaattcctttctctgttccagtgttgacgctgagattgtatttagcaatataagtttccccctgtttttgtagttgt

SEQ ID NO: 52437 - DNA, 201 bp, Homo sapiens; identical to SEQ ID NO: 25467

SEQ ID NO: 52438 - DNA, 201 bp, Homo sapiens
atttttcaggctggtaagcaaaacatgattgtatatctatatagataccagggaaattggcttacttgattatggaggctgaaaagtcccacaacaggctstctgcaagctggagaccctgggatgctggtagtatggcccagtgcaagtccagaagcctcagaaccagggaagctgatggtgtaagtctcaatcctaggc

SEQ ID NO: 52439 - DNA, 201 bp, Homo sapiens; identical to SEQ ID NO: 25468

SEQ ID NO: 52440 - DNA, 201 bp, Homo sapiens
gctggtagtatggcccagtgcaagtccagaagcctcagaaccagggaagctgatggtgtaagtctcaatcctaggccaaaggcctgagggcctggggtaaytggggaggggcactggtgtcagtcttggagtccaaaggctggagagcctggagttgtgatgtcctgttcaagggcagaagaagggtgacccagctccagg

SEQ ID NO: 52441 - DNA, 201 bp, Homo sapiens; identical to SEQ ID NO: 25470

SEQ ID NO: 52442 - DNA, 201 bp, Homo sapiens; identical to SEQ ID NO: 9176

SEQ ID NO: 52443 - DNA, 201 bp, Homo sapiens; identical to SEQ ID NO: 25472

SEQ ID NO: 52444 - DNA, 201 bp, Homo sapiens
aaattattggtgcatcaaaagttgataaagtacattttaattatcaaaacagaagttttgaatattgaatcttgatagttgctttaatttttttattaccrtcacacacatctgccatcatatgacaaagagactgccatttacttttcagtgggtaatatattacataattgttatttattatatgaactgtattaaaat

SEQ ID NO: 52445 - DNA, 201 bp, Homo sapiens; identical to SEQ ID NO: 3177

SEQ ID NO: 52446 - DNA, 201 bp, Homo sapiens
attggtgcatcaaaagttgataaagtacattttaattatcaaaacagaagttttgaatattgaatcttgatagttgctttaatttttttattaccgtcacwcacatctgccatcatatgacaaagagactgccatttacttttcagtgggtaatatattacataattgttatttattatatgaactgtattaaaatagggt

SEQ ID NO: 52447 - DNA, 201 bp, Homo sapiens
agtggtgcatgtatcagcatctcagaagggagttgttctgagagaattatcatcttggctggacccactagcgccatcttcaaagcaagattggaagaggrtatcagtagctctgtgaccactagcacagctgccagtggaccccctggtcaccctgatgctggtggtccctgctagtcactgtggctcattggaaaaggt

SEQ ID NO: 52448 - DNA, 201 bp, Homo sapiens; identical to SEQ ID NO: 25382

SEQ ID NO: 52449 - DNA, 201 bp, Homo sapiens
attctgtaacaaaattatatgttttttttaatttgaaataaattttatgttaggtttttggctcttgtccaaggaagaacatgcagataactattctcacrtgtcgacatgttaccgattataaaacctcagaatccaccggcagccttccttctcctttcctgagagccctaaaaacacagaatttcaaagactcggcgt

SEQ ID NO: 52450 - DNA, 201 bp, Homo sapiens
tctgttccagtgttgacgctgagattgtatttagcaatataagtttccccctgtttttgtagttgtttgttttttgagaaagggtcttgctctgtcgcccrggctggagtacagtggggcaaacatggctcactgcagccttgaccgctcaggctcaagcagtcctctcacctcagacccccaagtagctgggaccacagg

SEQ ID NO: 52451 - DNA, 201 bp, Homo sapiens
agccactgtgccagcctgtcatccacccttttttttttaattaaggtgttttaattcctttctctgttccagtgttgacgctgagattgtatttagcaatrtaagtttccccctgtttttgtagttgtttgttttttgagaaagggtcttgctctgtcgcccaggctggagtacagtggggcaaacatggctcactgcagc

SEQ ID NO: 52452 - DNA, 201 bp, Homo sapiens
gggctcaggtccaggtggcaggggatatgctccccaacgctgctgactgagccatcactatcgctgggattccgcagtccatcattgagtgtgttggacargtctgtgtggtgttggagtcttcccccaaacgcatggccatcccatactggtccaagctgtccaattctccggtgatctttgcaggtgatcaggacaggt

SEQ ID NO: 52453 - DNA, 201 bp, Homo sapiens
agtgcaggtttggatgcatctgctcagaccacttctcataaacaccattccaaatgatactggctgcataatcaggtgtcaaggcaccagaataaatgagrtctatcagatgtctgcagcgtagatcaaaattgtgaacccagtggaaggatctattgataggcaggttaccatcactggatctgctgccagcattagcct

SEQ ID NO: 52454 - DNA, 201 bp, Homo sapiens
cctcaactgtgacctggagggaccacttctagagttgaccaagctgcaccagttgacaatgcaacaatctagttttcctacagtagatagcaacgctgggrttcagtgcaggtttggatgcatctgctcagaccacttctcataaacaccattccaaatgatactggctgcataatcaggtgtcaaggcaccagaataaat

SEQ ID NO: 52455 - DNA, 201 bp, Homo sapiens
accacttcgtccatgtgcctcaactgtgacctggagggaccacttctagagttgaccaagctgcaccagttgacaatgcaacaatctagttttcctacagkagatagcaacgctggggttcagtgcaggtttggatgcatctgctcagaccacttctcataaacaccattccaaatgatactggctgcataatcaggtgtc

SEQ ID NO: 52456 - DNA, 201 bp, Homo sapiens
tgtgtgttactgtccctgaagaccttctagcgggacaagatatggaggcggaagacagtgagatattgatgattctgaccctgtgtaggcctaggctaatrtgtgtgctgtgtctcagtttttaacaaaaagcaaaaaacaaaacttttgaatggaaaaaagcttatggaataaggatataaagaaaaaatatttctgtac

SEQ ID NO: 52457 - DNA, 201 bp, Homo sapiens; identical to SEQ ID NO: 25385

SEQ ID NO: 52458 - DNA, 201 bp, Homo sapiens
gaaaataaattttaaaatggtggagttaaatgcttcttatctcttctgctttctttttcacctttttagttattgaatcatttacatactatagatttagmgtacttacccatttatattttctagttccagttcatttactgtttttggtaatgattagaagtatggtaaggagatactgtgttctaactccttcttgag

SEQ ID NO: 52459 - DNA, 201 bp, Homo sapiens; identical to SEQ ID NO: 3173

SEQ ID NO: 52460 - DNA, 201 bp, Homo sapiens
agactttcccagggctctctttcaaggctggctctgcgcgtgtcagcagttctcttacagtcatgtgttatcattaggagtgtgaatggaatcatgaaccyggagtagccacacaacttcacaggaccacaaactgaactgcattcatgaaaataaattttaaaatggtggagttaaatgcttcttatctcttctgctttc

SEQ ID NO: 52461 - DNA, 201 bp, Homo sapiens
tatgaactgtattaaaatagggtttggttggggtttctttttgctttcaatgtttactagaatgagaagtggctaaatatttcactttatgcattttgtayttatttgttatttatatgctttattatagtcagtagaattttaatctttcagctacttaaatcatctcagctgtattttcaggaaatataaaattaatat

SEQ ID NO: 52462 - DNA, 201 bp, Homo sapiens; identical to SEQ ID NO: 25506

SEQ ID NO: 52463 - DNA, 201 bp, Homo sapiens; identical to SEQ ID NO: 25387

SEQ ID NO: 52464 - DNA, 201 bp, Homo sapiens
ggtgtgagccactgtgcccaactttagttaaatttttcaaagctacagatatcagcagatggtattcatgtggcaaagtgtagttaattaggtgtaactaytcattgacctgttggtgattcttaatatgtggaaagtttctggatattttaggagtcctgcagttttttttatcttgtgggtaaaaattgatgacaaagt

SEQ ID NO: 52465 - DNA, 201 bp, Homo sapiens; identical to SEQ ID NO: 25389

SEQ ID NO: 52466 - DNA, 201 bp, Homo sapiens
atatattttgagaatgatgaaacggaataaaattgtaaaaaattaattgtagttttaattccttatttatggtggtattattcacaaccaaaataagccargcattttccttttatccactaggtgggagtattgttgtatttgaatattttaaggtactatagttaaatttttatcttatttatttatttatttattttt

SEQ ID NO: 52467 - DNA, 201 bp, Homo sapiens
acttgtccattcctttaaggggagcagcctgcactcttttgtagattacttttgggggatatattttgagaatgatgaaacggaataaaattgtaaaaaaytaattgtagttttaattccttatttatggtggtattattcacaaccaaaataagccaagcattttccttttatccactaggtgggagtattgttgtattt

SEQ ID NO: 52468 - DNA, 201 bp, Homo sapiens
gaggggtgttgcctctgcctgaatccctggggtctcactgtattcacttttttctctcctttcagaatattccccaaagcactgagatactaaagaaattsatgacaacaaatgagattcagagtaacatttatacatgatcttaaacattgttttgtagtgtatattacttgtccattcctttaaggggagcagcctgca

SEQ ID NO: 52469 - DNA, 201 bp, Homo sapiens
agtgtatttgtgttttaagctaagttattagaaaagagtcaaaaagttaaaaaaataaaagtttagaaagcagaaaagttacaggaagctgagattgacaycagcagaggcagcagcctgagcagctacaggctgtgctctctcccacctgccctgaggtctctcccttctttctcttcctccaccaccttttctcctcct

SEQ ID NO: 52470 - DNA, 201 bp, Homo sapiens
tatcatggttcactgcatcctcgacctcctgggctcaagcatttcccccgcctcggcctcccaaaatgctgggattacaggtgtgagccactgtgcccaamtttagttaaatttttcaaagctacagatatcagcagatggtattcatgtggcaaagtgtagttaattaggtgtaactactcattgacctgttggtgattc

SEQ ID NO: 52471 - DNA, 201 bp, Homo sapiens
tgaatcttgggtagaagtgtgcagagggaagcagtgtgagcagagtgggaaagtgtgaggagagccgtgaggagtgtggtgttggtggagaggggaggaaracatcttgtggggaaggtcgggcgggttagagcatagacttcctccagaggccaggagaccatcggaggccaggagatcatcggcgagtgtggcagggaa

SEQ ID NO: 52472 - DNA, 201 bp, Homo sapiens
ctcatcccacttaactcagagatgagttcccatgggcaggggctgggctgttttgtttactgctgtaggactgtgtgtagcacacaggtgtgtcataaacrcttggacttgttcagagacttggaaatcatctgtcatatggggcttaaggaaactcagcttttatgaatatactttcaaggggaaatttaactcagcatt

SEQ ID NO: 52473 - DNA, 201 bp, Homo sapiens
attataatatttatttacccaattttacagagaactgtatatgtgaagatgagagaattacataatgaacctcttccttacccttggtttatacctttggkctcattttctaaaaaaattggaacacgtacatgaaaatgtttgcctgtaatctcaggtagtttagggattccattgttttctcttaagagacttttttgg

SEQ ID NO: 52474 - DNA, 201 bp, Homo sapiens; identical to SEQ ID NO: 25693

SEQ ID NO: 52475 - DNA, 201 bp, Homo sapiens; identical to SEQ ID NO: 25695

SEQ ID NO: 52476 - DNA, 201 bp, Homo sapiens; identical to SEQ ID NO: 25399

SEQ ID NO: 52477 - DNA, 201 bp, Homo sapiens; identical to SEQ ID NO: 25696

SEQ ID NO: 52478 - DNA, 201 bp, Homo sapiens
ggggaaatttaactcagcattttcatttttgctttggagataatgattagcaggagggtaagatggtggttctgcagggtgctgttttcttaatgaccaawtacatcagcctgagtcagttcgttgtttctgaccttttaaaagtggtattttcaataaggtggaattattttgagttcttcctgtgtggcagtttagttg

SEQ ID NO: 52479 - DNA, 201 bp, Homo sapiens
agatgagagaattacataatgaacctcttccttacccttggtttatacctttgggctcattttctaaaaaaattggaacacgtacatgaaaatgtttgccygtaatctcaggtagtttagggattccattgttttctcttaagagacttttttggaagtccacagcctctggtttaagcatggtttctttaaaggaaagag

SEQ ID NO: 52480 - DNA, 201 bp, Homo sapiens
tgaagatgagagaattacataatgaacctcttccttacccttggtttatacctttgggctcattttctaaaaaaattggaacacgtacatgaaaatgtttkcctgtaatctcaggtagtttagggattccattgttttctcttaagagacttttttggaagtccacagcctctggtttaagcatggtttctttaaaggaaa

SEQ ID NO: 52481 - DNA, 201 bp, Homo sapiens
ctaccagaagcttgaagggtttggttaaggtaaggttttaactcatttaaattaatagctgcattgttataatcagcttagtaacaaacataaatgtatastgtcattttaaaccctaagcaatgcttggagatccattcttctcaaagcgaagctttctagtctggcagtttgaatttgattgtcatcatctcttctgta

SEQ ID NO: 52482 - DNA, 201 bp, Homo sapiens
taaaggtgtttaatttaaaagtaacataatagaaaacttacatcgtttttttttcttgtgtattcatagttctaagctactgtcaagtatggaaaatcccrgcaattctgtacttgtgttatactgatgtgatgaaattagacctaatcacagtggaagcttttaagcctatactttctaccagaagcttgaagggtttgg

SEQ ID NO: 52483 - DNA, 201 bp, Homo sapiens; identical to SEQ ID NO: 25703

SEQ ID NO: 52484 - DNA, 201 bp, Homo sapiens
tgcgtgtgtgttctgggcattccaatttggatttccctttccctcccccaatgcactttactgtgtgcccaatccaggagctgccccgggagcagcctctrccccctggccccattggcacagaacgatcacagcgtacagaccgaggcacagagcctggccccattcggccatcccatcgacctggtcccccagtccagt

SEQ ID NO: 52485 - DNA, 201 bp, Homo sapiens
ggagctagtactgctagctactcaggaggctgaggtgggagaactgtttgagcccaggagttcaaggttacagtgagctttaactcactggattgcaccaytgcactccagtctgggtgacagagcaagactctgtaacttaaaaaaaaaagaaaaaagctggccgggcacgatggctcaagcctgtaatcccagcacttt

SEQ ID NO: 52486 - DNA, 201 bp, Homo sapiens
gggctagggagcgccaagacttgggagtagggattctgtatttcaaggtaggcagctcatgatttttttcccctcagctgcatccagtggaactaaagccrttccaggattatcaaaaactgagcagcaaccttgggggacctggatcatcacggactcccccaactggaaggtgaaacggaatagggatgtggactttcc

SEQ ID NO: 52487 - DNA, 201 bp, Homo sapiens
ccccatcactttcagctgtgttcacttgtcctccaatcattgatacctctctctaccttttccaaaatacagattctacaacttggagggacggaggtggkcgtggccctgatgagctggagggcccggactccaaacttcatcatggtcatgatccccggggtgggctacagccttcaggcccaccccagttccctccct

SEQ ID NO: 52488 - DNA, 201 bp, Homo sapiens
ccctttccaaacacaagatgataccagtttatttaccagactctcctgtgatttccaagattaaaaaatggcaaagaagatggggtctggtatcaggttamtgaagaaagactaagaagataagaaagcaaaaaaggtcccagcacagtggctcacacctgtaatcccagcactttgggaggccgaggcaggtggatcacc

SEQ ID NO: 52489 - DNA, 201 bp, Homo sapiens
gacagagagggactccatctcaaaaaattaaataaataaacttaatgaagctcaggttatagatccaggaaaaataacacggatgaaaaacaaaaaaaaamcacatggacattatattatctgtctggcatccaagggagtatgtgtctagagacatcagtgacccctttccaaacacaagatgataccagtttatttacc

SEQ ID NO: 52490 - DNA, 201 bp, Homo sapiens
aaacagaaaaatagtaaaagagagtctgcatcataataaagtgttcttttcccacctagttctggttttcctgagatacttatttccattctttctgtctktctcttcaggagcgagactcctccagtacctcccccaccaccctatctggccagttatccaggctttcctgagaatggagcccctgggcccccaatctct

SEQ ID NO: 52491 - DNA, 201 bp, Homo sapiens
ttatttccattctttctgtctgtctcttcaggagcgagactcctccagtacctcccccaccaccctatctggccagttatccaggctttcctgagaatggrgcccctgggcccccaatctctcgctttcctctggaggaaccagggccccgtccactcccctggcccccaggcagtgatgaagtggccaagatacaaactc

SEQ ID NO: 52492 - DNA, 201 bp, Homo sapiens
tatttccattctttctgtctgtctcttcaggagcgagactcctccagtacctcccccaccaccctatctggccagttatccaggctttcctgagaatggarcccctgggcccccaatctctcgctttcctctggaggaaccagggccccgtccactcccctggcccccaggcagtgatgaagtggccaagatacaaactcc

SEQ ID NO: 52493 - DNA, 201 bp, Homo sapiens
tcttccgcacccagcgcgtcgacctttaccagcaggtgaaggagaaacccttgtggccccaactctaaattcgagttgccacctgatttcctgtccttccrtctcatcgctgacctctcactgtgactcactctttaacacatgcctgtcccctaggcctccccaccagatgccctgcgctggatacctaagccttgggag

SEQ ID NO: 52494 - DNA, 201 bp, Homo sapiens
aagctcaagagactcaagctatgccataaaaattagtaatttcactcaacagtctatcaaggacctatctccattatgggttctgatttctaccctttaaraacacagcatagacctgaccaatgtctatcagtaagacacacttgcttagggttcctgtgctgtttcccttcccaaaggccagagccatgcctgtccctt

SEQ ID NO: 52495 - DNA, 201 bp, Homo sapiens
tttttagtagagacggggttttgccatgttggccaggatggtctccatttcttgaccttgtgatctgcccgcctcagcctcccaaagtgccaggactacargcataagccaccacgcccggcctcatatctcttaataagagtttttctagaaacatttctcaatcaccccaggcataatcatattttatttctctacttc

SEQ ID NO: 52496 - DNA, 201 bp, Homo sapiens
gaatggactgagagacctgtcgtccggcttgcttagggagctggaggtatcgagtaaagaaacactggtgatggacatttttaatgaggataggaaaacgragatggctctggccttggccctctgttttctggcccatggttacagggtgctaaggtggctccataatgctttttctcagttcttcatatggtaaaacag

SEQ ID NO: 52497 - DNA, 201 bp, Homo sapiens
gcccccaccccgctgagggagttcctcttgccccctacccccggggcttgtatatagattataaatatataagggggaaaggggtgggcggggaggggttstggggctggggcctcacttcccctcctcccccttcccctggtcccctgtccctggggctgtttgttaaaaaagagtaataaaaggatttaaaaaaaaaaa

SEQ ID NO: 52498 - DNA, 201 bp, Homo sapiens
taccacaacctccacctcctgggtttaagcgattatcctgcctcagcctcctgagtagctgggattacaggcatgcgccaccacacccggctaattttgtrtttttagtagagacagggtttctccattttggtcaagctggtcttgaactcctgacctcaggtgatccgcctgcctcggcctgccaaagtgctgggattg

SEQ ID NO: 52499 - DNA, 201 bp, Homo sapiens
atggcaagccagccactcacctgcaagaagtcagtcatgccttggagaaaggcagggacaccaggcatcgccacagtgatggtgggagaagccacaccagrccctccagcccctggccctgcaggccctagcaggttccccagaagctgagagaactgaagatcagccatggagggttgaggggtgggtggaggctgggca

SEQ ID NO: 52500 - DNA, 201 bp, Homo sapiens
gaaaaagtttcctcattaaacgaggggaggggagactgaataacaagagctcccaccatctctacatagtttgattccaggcatgacggggaaacctggayagagagagaggcttagggaagaggaaaaccaaccttgcgtctcttggcaggcataccactgaggtaggcatcactcagagggggctgcggtttcaccttc

SEQ ID NO: 52501 - DNA, 201 bp, Homo sapiens
ccggccggggagaagggagaagagaatcattttggaagtttgaaaacagaagtcatcttaaatcttactgagcctctgactaaaattctcatctgatttcygcaaacttttctgccttcacttttcataatgaataagccgcctcctttatttagccatatcagcctaggcacaggcccccaaactcatgcctccactaat

SEQ ID NO: 52502 - DNA, 201 bp, Homo sapiens
tatctccagcgccttcaaatcatagtcattgaatgatctgttgaatgggtataactctgatgggagcagagagttctagaatcgggtagtaagagacaaasgagggtaacagtactgcatttcacaaaatgaaacccattgttaagaaattacaaattcccaataatttcaaatataaaaatttattcatgaaaattatag

SEQ ID NO: 52503 - DNA, 201 bp, Homo sapiens
agaaaaccagagctgctacaggaggtaagggatgggtttgagattgtgcttcactgcactcttactcgtgaaaattcttctgggttatgttttctctgttytctttcctgtttctttcactgtgtttttactccagaattctcagtattagtctcccatgtgtctcccttgttgtccccacaccctgtgtcaccccactct

SEQ ID NO: 52504 - DNA, 201 bp, Homo sapiens
cacgggccgtgtgtcgttgccttccacttttggcgtcccaacgtctctccgctcccatctttctactaacgtccgacgcacgctccgcctctttctcccamattcgtcgtgtaaattctgcgtcccaaccgcccagccgacctgcaccgcattcccgccccctcaacacggctcaacggccgacgctgggggcccgcctcc

SEQ ID NO: 52505 - DNA, 201 bp, Homo sapiens
tactctgtctcaaaaaaaaaaaaaaacaaacatcaaaactggcttgtacaatttagcgtgctgagtagaacacaacagtgttccaaggaagtattaatttwaaaaagttcacacaagattaagggacacactacctaatggagacaatgtagagagaaagcagccagaaaaatccgacttttatttcttaaatactgtgaa

SEQ ID NO: 52506 - DNA, 201 bp, Homo sapiens
ctgtcgctaggctggagtgcagtggcgtgatctcagctcactgcaacctccgtctcccaggttcaagcgattctcctgcctcagcctcccaagtagctgaractacaggcacgcgccaccagtccagctaatttttgtatttttagtagagacggggttttgccatgttggccaggatggtctccatttcttgaccttgtg

SEQ ID NO: 52507 - DNA, 201 bp, Homo sapiens
caggtgaaggagaaacccttgtggccccaactctaaattcgagttgccacctgatttcctgtccttccgtctcatcgctgacctctcactgtgactcactstttaacacatgcctgtcccctaggcctccccaccagatgccctgcgctggatacctaagccttgggagcggacagggccgccacctcgagaagggccctc

SEQ ID NO: 52508 - DNA, 201 bp, Homo sapiens
tcgtgtcgagccactcccactctagaatcctgcttttatcccagcatctttgctttctatgttgctcagtcgccctatgtctgctttttcatttttcctgktcctcgtctcctttctcccccaaccccgtttttcttcttgggcctctgcccccttacttcgttgtctacatcctttttttttttgccattcctgtttcca

SEQ ID NO: 52509 - DNA, 201 bp, Homo sapiens
cccaaatttcttgttacagatgcttctacccatggtagactcacagctgcctgtggtgaactttggctccctgccgccagcaccacctcctgccccacctyccctttctctgttacctgtgggccctgctctgcagccccccagcctggctgtgcggcccccacctgctcctgctactcgggtgctgccttcacctgccag

SEQ ID NO: 52510 - DNA, 201 bp, Homo sapiens
tagctgggattacaggtgtgcaccactacatccagctaatgtttatattttcagtagagatggggttgcaccatgttggccaggctggtctcaaactcccratctcagatgatccgcccaccttggcctcccaaagtgctgggattacaggcgtgagccactgcacctggccctgttgcaatgtttttccagggagggaaa

SEQ ID NO: 52511 - DNA, 201 bp, Homo sapiens; identical to SEQ ID NO: 28531

SEQ ID NO: 52512 - DNA, 201 bp, Homo sapiens
tcctaagacggcctgggcagaaacctctcggcctccagagacagagccgggacctcctgccccaaagcctcccctacccccacctcaccggggccccgccrggaactggggcccccctggggactacccagtgagtgtctccaataagggattgagagggtcagctgtgggaaattggtgtcagctgagtaattgaagcgg

SEQ ID NO: 52513 - DNA, 201 bp, Homo sapiens
ggtctcaaagaagaccaggataatgagtttgtcaccacccagagagatcaaccccaaagcctgggtcgttgcatcctgcaagtagcgacagttgatttgtygtaaaagagatgatagaaagcatagtaactgattcccctggccctgctgggtcttgccaattgacaggatcgtgggggtcctccctgcaagcccccagca

SEQ ID NO: 52514 - DNA, 201 bp, Homo sapiens
cataatcatattttatttctctacttctttcttttttttttttttttgagatagagtttcgctcttgttgcccaggctggagtgcaatggcacgatcttgsctcaccacaacctccgcctcccaggttcaagcgattctcccgactcagcctcccgagtagctgggatcataggcatgcgccaccacgcctgggtaattgt

SEQ ID NO: 52515 - DNA, 201 bp, Homo sapiens
tactgttgttctaatggtttcatagaaagttaatgccaccaccataggctcatgagaggccatgaagtgctttaatgggtcttaaatgggaggggcttcartagaatagatgttgaatagaatattttagtcttaagggagctagagatgagacgtgagattcctggggtgttcatggagtgtctattgttggactagatc

SEQ ID NO: 52516 - DNA, 201 bp, Homo sapiens
cagacagtgggggctcaagctcagagccatttgaccgtcatgcacctgctatgttacgggaacggggcactccaccggtggatccaaagttggcctgggtrggagatgtcttcaccgccacacccgctgaaccccgcccacttacctcacctctgcgccaggctgcggatgaggatgacaaggggatgaggtgagtcttgg

SEQ ID NO: 52517 - DNA, 201 bp, Homo sapiens; identical to SEQ ID NO: 9224

SEQ ID NO: 52518 - DNA, 201 bp, Homo sapiens; identical to SEQ ID NO: 9225

SEQ ID NO: 52519 - DNA, 201 bp, Homo sapiens; identical to SEQ ID NO: 9226

SEQ ID NO: 52520 - DNA, 201 bp, Homo sapiens
tctgtctagccacctcatttgcatgacgtaatataataactggaaggccccgcccctctggtgcatttccccgctccaaccacctcctcaaactcacggcraagggatgcgagagctggaactcttaccaggcctgcggaaactcagccctccggcagctaatcccgcccgccagcccccgtcctctctctctttctccct

SEQ ID NO: 52521 - DNA, 201 bp, Homo sapiens
caggcattgtggctcacgcctgtaatcccagcacttagggaggccgaggtgggcagatcaactgagttcaggagttcgagaccaccatggctaacgtggtraaaccccatttctactaaaaatacaaaaaagtagccggcgtggtggcgctcgcctgtagtcccagctactcgggagactgaggcaggagaaacgcttgaa

SEQ ID NO: 52522 - DNA, 201 bp, Homo sapiens
tcataggcatgcgccaccacgcctgggtaattgtatttttagtagagacggggtttctccatgttggtcaggctggtctcgaactcgtgacctcaggtgayccgcccgcctgagcctcccaaagtgctgggattacaggcgtgagccaccgcgcccatccttctttttttttttttttttttttttttgagacgtagtctt

SEQ ID NO: 52523 - DNA, 201 bp, Homo sapiens
agaggcctccagcttggtctgtctccccacctctaccagcatctgctgagctatgagccaaaccagggatttacagggtagggagggtgggataggcagcrgcattagatcggaggaatgagatggacagacctgggctgtgggctaggagggcagtcagctggcctagggtagcccgggctggtgtcagggtaaggagag

SEQ ID NO: 52524 - DNA, 201 bp, Homo sapiens
tgtccgatcgctcggggccgactgccaagggaaaggatggaaagaagtattcctcgctcaacctgtttgatacgtataagggcaagtccttagagatccaraaacccgctggtgagagtcctgcaaagatgcttctgatggttgaaagctaggcatgcatggggcatacgttttagagctctttaaagggaagtggctgta

SEQ ID NO: 52525 - DNA, 201 bp, Homo sapiens
gcctctgtgaggcttttttctaaaaatggggataaagtgacctatgctattgtgcctgacatatcataagccctcaataatgtttaaaacttgaatgagcyggggccgatggcttatgcctgtaatcccagcactttgggaggatggggtgggcagatcacctgaggtcaggagttcgagaccagcctgacgaacatgaag

SEQ ID NO: 52526 - DNA, 201 bp, Homo sapiens; identical to SEQ ID NO: 9189

SEQ ID NO: 52527 - DNA, 201 bp, Homo sapiens
acggagcttctcaagtcagcggccaggcatggaacggcagaatcggcgccctggcccagggggcaaggctggcagcagtggcagcagcagtggaggaggcrgtgggggtcctggaggaaggaccgggccaggacgaggcgacaagaggagctggccctctcccaagaaccgaaggtgggtaggaacaaacaaatttattgt

SEQ ID NO: 52528 - DNA, 201 bp, Homo sapiens
agccagagagccaaggatttgagtaaacggagcttctcaagtcagcggccaggcatggaacggcagaatcggcgccctggcccagggggcaaggctggcarcagtggcagcagcagtggaggaggcggtgggggtcctggaggaaggaccgggccaggacgaggcgacaagaggagctggccctctcccaagaaccgaagg

SEQ ID NO: 52529 - DNA, 201 bp, Homo sapiens; identical to SEQ ID NO: 9193

SEQ ID NO: 52530 - DNA, 201 bp, Homo sapiens; identical to SEQ ID NO: 9194

SEQ ID NO: 52531 - DNA, 201 bp, Homo sapiens
atggagtggctcatgcctgtaatcccagcattttgggaggctgaggcaagaagattgcttgagcccagcagttcgagactagcctcggcaactggatgccrtctctgccaaaacaaacagaaaaatagtaaaagagagtctgcatcataataaagtgttcttttcccacctagttctggttttcctgagatacttatttcc

SEQ ID NO: 52532 - DNA, 201 bp, Homo sapiens; identical to SEQ ID NO: 9197

SEQ ID NO: 52533 - DNA, 201 bp, Homo sapiens; identical to SEQ ID NO: 9198

SEQ ID NO: 52534 - DNA, 201 bp, Homo sapiens
atgcataggaacccttagaaggactcaaaaacacctggactttaatagggaagagaataggttgtaagcagaagttgggaaacataacttgtgggaaaaartaacgatttagtggatactggagctaatgctctgttttctccagtcgtcctccagaggagcgtcccccggggcttcccctgcctcccccacctcccagca

SEQ ID NO: 52535 - DNA, 201 bp, Homo sapiens
tatgtattcattgctggttctttgctttccagtctgtgcatctgtatgcataggaacccttagaaggactcaaaaacacctggactttaatagggaagagrataggttgtaagcagaagttgggaaacataacttgtgggaaaaagtaacgatttagtggatactggagctaatgctctgttttctccagtcgtcctccag

SEQ ID NO: 52536 - DNA, 201 bp, Homo sapiens
gttttctatggcagtgctgggccttccagttctcaggtaggccccgcttcccattgcatgaccccttcagtgaataataatttttttctgcctggtatgtrtttataatcaagcctttctacgttgcagagttgtgagataccactttgtcacatcatttttctccctactttttgcttctatgggtgggatggtgatctt

SEQ ID NO: 52537 - DNA, 201 bp, Homo sapiens
ctatgggtgggatggtgatcttttttcttgaccacagatactaaagctgtttcaaccgtgctcctctcctgcagatctctgggggagccatggactctcarttacatccaaacagtggaggcttccgccctgggacaccctcactgcacccttacaggtaagactcgatgcctgtggatcacagaagtacttggagatgtg

SEQ ID NO: 52538 - DNA, 201 bp, Homo sapiens
gacccccactttgaggagccggggccaatggtgagaggggtgggtgggactcctcgggactctgccggggttagtccctttccccctaaacgtcgggagcrgcctcccagaaaaccagagctgctacaggaggtaagggatgggtttgagattgtgcttcactgcactcttactcgtgaaaattcttctgggttatgtttt

SEQ ID NO: 52539 - DNA, 201 bp, Homo sapiens
cctttccctcccccaatgcactttactgtgtgcccaatccaggagctgccccgggagcagcctctgccccctggccccattggcacagaacgatcacagcrtacagaccgaggcacagagcctggccccattcggccatcccatcgacctggtcccccagtccagtttggcactagtgacaaggtctgtgtgggctggatc

SEQ ID NO: 52540 - DNA, 201 bp, Homo sapiens
ctagaagctagtggacttaaggcattgctaggactctggcttcctaacagcttttctccccacaatttattttcagatcacagcccctatacctacccccsggcccagcccctccctcagcactgctctctggggtagctctcaagggccagtttctggatttctccacaatgcaagctacagagctggggaagttgccgg

SEQ ID NO: 52541 - DNA, 201 bp, Homo sapiens
actggaaagcggttggtagggtgttagagtcaagaacacccacctatgtattcattgctggttctttgctttccagtctgtgcatctgtatgcataggaayccttagaaggactcaaaaacacctggactttaatagggaagagaataggttgtaagcagaagttgggaaacataacttgtgggaaaaagtaacgatttag

SEQ ID NO: 52542 - DNA, 201 bp, Homo sapiens
gacctctcactgtgactcactctttaacacatgcctgtcccctaggcctccccaccagatgccctgcgctggatacctaagccttgggagcggacagggcygccacctcgagaagggccctcccgacgggcagaggagcctgggtcccgaggggacaaggagcctgggttgcccccaccccgctgagggagttcctcttgc

SEQ ID NO: 52543 - DNA, 201 bp, Homo sapiens
ggctaaggcaactggaaagcggttggtagggtgttagagtcaagaacacccacctatgtattcattgctggttctttgctttccagtctgtgcatctgtaygcataggaacccttagaaggactcaaaaacacctggactttaatagggaagagaataggttgtaagcagaagttgggaaacataacttgtgggaaaaagt

SEQ ID NO: 52544 - DNA, 201 bp, Homo sapiens
cgcgtctactgccttcccacggtgttccagcagaacggcacaactaacccacagccaaacacacacacacacacacacacacacacacacacacacacacmcaccaccccgcggctccgcccccgacttccccacggaccgtcacttccggtctcccccaaacctgccaccgacggccacttccgtttccccgatagtatt

SEQ ID NO: 52545 - DNA, 201 bp, Homo sapiens
cctatgtctgctttttcatttttcctgttcctcgtctcctttctcccccaaccccgtttttcttcttgggcctctgcccccttacttcgttgtctacatcstttttttttttgccattcctgtttccatatattttccacctgctttcgtattcattattttctgttagttttggtctattcgctacatgactcttgtatt

SEQ ID NO: 52546 - DNA, 201 bp, Homo sapiens
  misc_feature (101)..(101): n is a, c, g, or t
ttacacaactccagcaaccgggccccaaatccactatctgtgggcaaaatacaaggagggaatgctggcacgtggcagccctgcacatgcaacaggccccncttgcccccgcctggccagcccctgacctgtgcaatgcagcacatgcgcagcaatgctattaaactgctcttggagaaattccaggtttgtccggatgat

SEQ ID NO: 52547 - DNA, 201 bp, Homo sapiens
ttatttcttaaatactgtgaaggaagaggggggaaacggtcccctgatgaggaagggccatagagcaaagagctaaggatcatcagcaaaggcccgctggscattggggaagcgctggggactgtagttggggtcttcctgcagtcgtttttgtatatcagaccggagctaaagagaaaaagtaagcaggttggagaaacg

SEQ ID NO: 52548 - DNA, 201 bp, Homo sapiens
gagaccagcctggccaacatggtgaaaccccatctctactaaaatacaaaaaattagctgggcatggtggcaggtgcctgtaatcccagctactcgggagrctgaggcaggagaatcgcttgaacccgggaggtggaggttgcggtgagccgagatcacgccatggcactccagcctgggtgacaagagtgagactctgtc

SEQ ID NO: 52549 - DNA, 201 bp, Homo sapiens
ccaacatggtgaaaccccatctctactaaaatacaaaaaattagctgggcatggtggcaggtgcctgtaatcccagctactcgggagactgaggcaggagratcgcttgaacccgggaggtggaggttgcggtgagccgagatcacgccatggcactccagcctgggtgacaagagtgagactctgtctcaaaaaaaaaaa

SEQ ID NO: 52550 - DNA, 201 bp, Homo sapiens
gcttggtctgtctccccacctctaccagcatctgctgagctatgagccaaaccagggatttacagggtagggagggtgggataggcagcggcattagatcrgaggaatgagatggacagacctgggctgtgggctaggagggcagtcagctggcctagggtagcccgggctggtgtcagggtaaggagaggaagggaggga

SEQ ID NO: 52551 - DNA, 201 bp, Homo sapiens
aaaaaattagctgggcatggtggcaggtgcctgtaatcccagctactcgggagactgaggcaggagaatcgcttgaacccgggaggtggaggttgcggtgmgccgagatcacgccatggcactccagcctgggtgacaagagtgagactctgtctcaaaaaaaaaaaaaaaaaaaaaaaaagactggaaggagaaactcat

SEQ ID NO: 52552 - DNA, 201 bp, Homo sapiens; identical to SEQ ID NO: 9707

SEQ ID NO: 52553 - DNA, 201 bp, Homo sapiens
ggtctccaactcctgacctcaggtgacccacccaccttggcctctcaaagtgctgggattacaggcgtgagccactgctcccgctcccggccctttttttyttctttttcttttttttttttttttgagacgtagtctcactctgtcgctaggctggagtgcagtggcgtgatctcagctcactgcaacctccgtctccca

SEQ ID NO: 52554 - DNA, 201 bp, Homo sapiens
aagccaacaggccccccagccaagaaagctatctctgagttgccctgatttgaagggaaaagggatgatgggattgaaggggcttctaatgacccagatayggaaacagaagacaaaattgtaagccagagtcaacaaattaaataaattaccccctcctccagatcaagtcagcttagtttttatttgggtgattttttt

SEQ ID NO: 52555 - DNA, 201 bp, Homo sapiens
gatgccgcctttcgtgagtcttggtgtcttgtcttggaacgattacactggaagctggagagctaggaatcaggacttagtctttgacctatgagatagargggagggtgggaggatgattgatagcaggcttaaggagctagaagggtatatgactgtccctctgagcagctactgttggacccttttacagatgtatcc

SEQ ID NO: 52556 - DNA, 201 bp, Homo sapiens
agccaccacgcccggcctcatatctcttaataagagtttttctagaaacatttctcaatcaccccaggcataatcatattttatttctctacttctttcttttttttttttttttgagatagagtttcgctcttgttgcccaggctggagtgcaatggcacgatcttggctcaccacaacctccgcctcccaggttcaagc

SEQ ID NO: 52557 - DNA, 201 bp, Homo sapiens
aaagttgccattgcccggcgtatgccacctccagccaaccttccaagcctgaaagccgagaacaaaggcaatgaccccaatgtctcactagtgccaaaagwcggaacaggatgggcaagcaaacaggagcagtccgaccccaagaggtagacagaggcttgggggacctagagtgatgggtattttaacttgaacttcagg

SEQ ID NO: 52558 - DNA, 201 bp, Homo sapiens
ttggtcaggctggtctcgaactcgtgacctcaggtgatccgcccgcctgagcctcccaaagtgctgggattacaggcgtgagccaccgcgcccatccttctttttttttttttttttttttttttgagacgtagtcttgctctgtcacccaggctggagtgcaacctccgcctccctggttcaaggaattctctgcctcag

SEQ ID NO: 52559 - DNA, 201 bp, Homo sapiens
ctagagtgatgggtattttaacttgaacttcagggagcattggggcttggtttagtccagccacgtctgagccagagacgaagaggtccctttcttacctrttgcaggttccttgttaaatgactaaggaatggtactaaactttagctttttgtcttggagagagagcatgaaaaaatagacaacagcctacaaaggatg

SEQ ID NO: 52560 - DNA, 201 bp, Homo sapiens
caagaggtagacagaggcttgggggacctagagtgatgggtattttaacttgaacttcagggagcattggggcttggtttagtccagccacgtctgagccrgagacgaagaggtccctttcttacctattgcaggttccttgttaaatgactaaggaatggtactaaactttagctttttgtcttggagagagagcatgaa

SEQ ID NO: 52561 - DNA, 201 bp, Homo sapiens
tccaaccacctcctcaaactcacggcaaagggatgcgagagctggaactcttaccaggcctgcggaaactcagccctccggcagctaatcccgcccgccascccccgtcctctctctctttctccctagctgaaggcgccacgggccgtgtgtcgttgccttccacttttggcgtcccaacgtctctccgctcccatcttt

SEQ ID NO: 52562 - DNA, 201 bp, Homo sapiens
ccccgcgcacccggccaggtgagtctgggtgaaccgtgcgctgacgcccttttccggcgcgggagaggtggtggcggtggcggtggcggcggcggcggcgktggtgggccggggggaggagaagctgccattagccgccgccattttgtcctcctgctgccgggcctgcttgcccctccccctccggtacctctactccgg

SEQ ID NO: 52563 - DNA, 201 bp, Homo sapiens; identical to SEQ ID NO: 9706

SEQ ID NO: 52564 - DNA, 201 bp, Homo sapiens
ttcgtgtcgagccactcccactctagaatcctgcttttatcccagcatctttgctttctatgttgctcagtcgccctatgtctgctttttcatttttcctkttcctcgtctcctttctcccccaaccccgtttttcttcttgggcctctgcccccttacttcgttgtctacatcctttttttttttgccattcctgtttcc

SEQ ID NO: 52565 - DNA, 201 bp, Homo sapiens
caaacaaaaaacacttgaatgggtagatgaatgaaagaactggtgctattaaataaagcaaagaatttacagctgggcgtggtggctcacgcctgtaatcycagcacttcaggaggccgaagcgggcagattacctgaaatcaggagttggagaccagcctggccaacatggtgaaaccccatctctactaaaatacaaaa

SEQ ID NO: 52566 - DNA, 201 bp, Homo sapiens
ccctcctggtgtgcatccctctggtaagggggcatgggaggagtgagaaacaggaaagtcccctcagtcttaggcattggatattagggtcttactgtgaytctggtacgataggttttgcccatcatagtgatgagggaagggcatatgcttggcactgctgagatagctctgttgcaaaaatgggcttagttaagaaat

SEQ ID NO: 52567 - DNA, 201 bp, Homo sapiens
acagctgggcgtggtggctcacgcctgtaatcccagcacttcaggaggccgaagcgggcagattacctgaaatcaggagttggagaccagcctggccaacrtggtgaaaccccatctctactaaaatacaaaaaattagctgggcatggtggcaggtgcctgtaatcccagctactcgggagactgaggcaggagaatcgc

SEQ ID NO: 52568 - DNA, 201 bp, Homo sapiens
tttcctgagatggagtctcatgttggccaggctggtctccaactcctgacctcaggtgacccacccaccttggcctctcaaagtgctgggattacaggcgwgagccactgctcccgctcccggccctttttttcttctttttcttttttttttttttttgagacgtagtctcactctgtcgctaggctggagtgcagtggc

SEQ ID NO: 52569 - DNA, 201 bp, Homo sapiens
tttgccatgttggccaggatggtctccatttcttgaccttgtgatctgcccgcctcagcctcccaaagtgccaggactacaggcataagccaccacgcccrgcctcatatctcttaataagagtttttctagaaacatttctcaatcaccccaggcataatcatattttatttctctacttctttcttttttttttttttt

SEQ ID NO: 52570 - DNA, 201 bp, Homo sapiens
cctctcccaagaaccgaaggtgggtaggaacaaacaaatttattgtggtttaaaaattggaggagggggaaaaagcctgagggaaagataagtttgggtgkagtggagattgtggcctgaggggccatgggctctagaatgtcagtaggatttccatgtctggctaaggcaactggaaagcggttggtagggtgttagagt

SEQ ID NO: 52571 - DNA, 201 bp, Homo sapiens
gggccaggacgaggcgacaagaggagctggccctctcccaagaaccgaaggtgggtaggaacaaacaaatttattgtggtttaaaaattggaggagggggraaaagcctgagggaaagataagtttgggtggagtggagattgtggcctgaggggccatgggctctagaatgtcagtaggatttccatgtctggctaaggc

SEQ ID NO: 52572 - DNA, 201 bp, Homo sapiens; identical to SEQ ID NO: 9223

SEQ ID NO: 52573 - DNA, 201 bp, Homo sapiens
gagaaacgcttgaacccaggaggtggaggttgtagtgagccgagattgtgccatcgcactccagcttaggcaacgagcgaaactccgtctcaaaaatgaatgaatgaatagcacaactccatctcaaaaatgaatgaatgaatgaaagaagcagtggtccttcatttgccaggatttatttggggtgggttgattctcttg

SEQ ID NO: 52574 - DNA, 201 bp, Homo sapiens
tacaaaaaagtagccggcgtggtggcgctcgcctgtagtcccagctactcgggagactgaggcaggagaaacgcttgaacccaggaggtggaggttgtagwgagccgagattgtgccatcgcactccagcttaggcaacgagcgaaactccgtctcaaaaatgaatgaatgaatagcacaactccatctcaaaaatgaatg

SEQ ID NO: 52575 - DNA, 201 bp, Homo sapiens
tgcaaaaatgggcttagttaagaaataagcagtggttggccaggcattgtggctcacgcctgtaatcccagcacttagggaggccgaggtgggcagatcarctgagttcaggagttcgagaccaccatggctaacgtggtgaaaccccatttctactaaaaatacaaaaaagtagccggcgtggtggcgctcgcctgtagt

SEQ ID NO: 52576 - DNA, 201 bp, Homo sapiens
gaaagtcccctcagtcttaggcattggatattagggtcttactgtgactctggtacgataggttttgcccatcatagtgatgagggaagggcatatgcttrgcactgctgagatagctctgttgcaaaaatgggcttagttaagaaataagcagtggttggccaggcattgtggctcacgcctgtaatcccagcacttagg

SEQ ID NO: 52577 - DNA, 201 bp, Homo sapiens
ttgcactccagcctgggtgacagagcaagactctgtctcaaaaaaaaatcctgtctcacaagaaatacataaataaaaatgaaaactatttcctataggcyaagactgaagaaagtactgttgttctaatggtttcatagaaagttaatgccaccaccataggctcatgagaggccatgaagtgctttaatgggtcttaaa

SEQ ID NO: 52578 - DNA, 201 bp, Homo sapiens
aactgtttgagcccaggagttcaaggttacagtgagctttaactcactggattgcaccactgcactccagtctgggtgacagagcaagactctgtaacttaaaaaaaaaagaaaaaagctggccgggcacgatggctcaagcctgtaatcccagcactttgggaggccaaggtgggtggatcacaaggtcaagagttcgag

SEQ ID NO: 52579 - DNA, 201 bp, Homo sapiens
gaggcgggcagaacatgaggtcaggagttcaagatcagcctggccaacatagtgaaacccgtctctactaaaaatacaaaaattagccaagtgtggtggcwtgtgcttgtagtcccagctgcttgggaggctgaggtagtagaatcgctttaacccgggaggcagagatttctgtgagccaagaccatgccattgcactcc

SEQ ID NO: 52580 - DNA, 201 bp, Homo sapiens
accaggataatgagtttgtcaccacccagagagatcaaccccaaagcctgggtcgttgcatcctgcaagtagcgacagttgatttgttgtaaaagagatgrtagaaagcatagtaactgattcccctggccctgctgggtcttgccaattgacaggatcgtgggggtcctccctgcaagcccccagcacctgaagatgagg

SEQ ID NO: 52581 - DNA, 201 bp, Homo sapiens
agaggattggcagaaatgagagagcctcacaaagatactttttctgcccaaaagaatgaatactgcagagaagactagattatgaaggccaaaccctgtgratgtggccagtgaagccctaactcccaggctgagagaaaagggagagggagggtggagagagaccctagccagccttgcccacttacctccatccgggat

SEQ ID NO: 52582 - DNA, 201 bp, Homo sapiens
ttgagagctctatgctagtgtgcacctggaatatgctcccaactcaaaatacaggttttttatttatatataaagtgctttcgcacaaaaaatacaaacaycaggctgggcgcggtggcccacgcctgtaattccagcactttgggaggccaaggcgggtggatcacaaggtcaggagttcgagaccagcctggccaatat

SEQ ID NO: 52583 - DNA, 201 bp, Homo sapiens
agaaatatttttcctaactacaaactgactcttgggaagtaccagagtatttatatacatctaatcacaagtctatatatggctttcttatatccaggtartatcacattttagaaaaccatggaccaccccacatgcaatttgtctccaagtattacaggagtaaagacacagatagctatgtccaaggctttaagctca

SEQ ID NO: 52584 - DNA, 201 bp, Homo sapiens
agtgtgcacctggaatatgctcccaactcaaaatacaggttttttatttatatataaagtgctttcgcacaaaaaatacaaacatcaggctgggcgcggtrgcccacgcctgtaattccagcactttgggaggccaaggcgggtggatcacaaggtcaggagttcgagaccagcctggccaatatggtgaaaccctgtctc

SEQ ID NO: 52585 - DNA, 201 bp, Homo sapiens
gaaaagttagggtcagtggcagagccaggcagatgctgaccctttttctctttcccagacccccactttgaggagccggggccaatggtgagaggggtggrtgggactcctcgggactctgccggggttagtccctttccccctaaacgtcgggagcggcctcccagaaaaccagagctgctacaggaggtaagggatggg

SEQ ID NO: 52586 - DNA, 201 bp, Homo sapiens
ttttagtagaaatggggtttcatcatgttggccaggctggtcttgaactcctgatctcgtgatccacctgcctaggcctcccaaagtgctgggattacagscgtgagccaccgcgccaggccttatttctctacttctataatatcctgtgcattatctccagcgccttcaaatcatagtcattgaatgatctgttgaatg

SEQ ID NO: 52587 - DNA, 201 bp, Homo sapiens
ccccctaaacgtcgggagcggcctcccagaaaaccagagctgctacaggaggtaagggatgggtttgagattgtgcttcactgcactcttactcgtgaaawttcttctgggttatgttttctctgttttctttcctgtttctttcactgtgtttttactccagaattctcagtattagtctcccatgtgtctcccttgttg

SEQ ID NO: 52588 - DNA, 201 bp, Homo sapiens
tggactgagagacctgtcgtccggcttgcttagggagctggaggtatcgagtaaagaaacactggtgatggacatttttaatgaggataggaaaacgaagrtggctctggccttggccctctgttttctggcccatggttacagggtgctaaggtggctccataatgctttttctcagttcttcatatggtaaaacagtat

SEQ ID NO: 52589 - DNA, 201 bp, Homo sapiens
ggcacagaagtgagtgagggtgggagggtgtgtctgagctgggacttttttgagcactggtcataccccccacctgctctgggttgagtctggagctgttytctcacttggctgtcccctttctgcagtttgtatgtgtgcatcagtcaggtattggggtgctttctaccctgacttaactagctccttctccactcctct

SEQ ID NO: 52590 - DNA, 201 bp, Homo sapiens
cacagcaaccctgctggcatccaacaggctctggcccagcttagtagccgtcaagggagtgtaactgcaccagggggtcatccaaggcacaagcctgggcytccccaagcccctcagggcccctctcctaggcccccaacccgatacgagccccagagggtcaacagcggcctcagttctggtaagctggaggggttatgg

SEQ ID NO: 52591 - DNA, 201 bp, Homo sapiens
ggccaggagtgagctccgggttctgggctggggcacgctcctccacttcttctgcctccatgggctcccggggaggtgcttcactttcaactggttctgaygtttgagagctcaaggctactggctccggggtcacagccggtggctgcgggggcggctgactgtgctgcggttggggccctcctcgacactgaaggtagg

SEQ ID NO: 52592 - DNA, 201 bp, Homo sapiens
attattacttgtagggaattactctttgtagacaggcacaaagggcagagtgtttatactaggaggatgctggatttttacttagatttccttgacaaagktgtctgggggaaaggagggaacatggcatttgagctatgagggagctaagtagatcatggttgcttaagaagagtgggcagtttacatagactggaggaa

SEQ ID NO: 52593 - DNA, 201 bp, Homo sapiens
attggcacagaacgatcacagcgtacagaccgaggcacagagcctggccccattcggccatcccatcgacctggtcccccagtccagtttggcactagtgrcaaggtctgtgtgggctggatctgggtatcctgagttgggtggagagaagggaaggactaaaggtgggacatagaggacacatgtctgtcacgggacaat

SEQ ID NO: 52594 - DNA, 201 bp, Homo sapiens
cgggatagtaaggtctgtatatccctgatcatgtgctgagccatcaccagccgtacccggggctcactctacaatgagagaaggtttatcagggtaggttrcagatgaagccatgagttctaccacctactaaatcaggtcccagccatctctcagccaggtccaccccacctcccagcctccttctcccagatccccttc

SEQ ID NO: 52595 - DNA, 201 bp, Homo sapiens
tggtcaggctggtctcgaactcgtgacctcaggtgatccgcccgcctgagcctcccaaagtgctgggattacaggcgtgagccaccgcgcccatccttctytttttttttttttttttttttttgagacgtagtcttgctctgtcacccaggctggagtgcaacctccgcctccctggttcaaggaattctctgcctcagc

SEQ ID NO: 52596 - DNA, 201 bp, Homo sapiens
aggccaaggcgggtggatcacaaggtcaggagttcgagaccagcctggccaatatggtgaaaccctgtctctactaaaaatacaaaaattagccgggcgtsgtggcggacgcctgtagtcccagctactcaggaggctgaggcatgagtgagaatcacttgaacccgggaggtggaggttgtagtgagccgagctcgagat

SEQ ID NO: 52597 - DNA, 201 bp, Homo sapiens
agggcaagtccttagagatccagaaacccgctggtgagagtcctgcaaagatgcttctgatggttgaaagctaggcatgcatggggcatacgttttagagytctttaaagggaagtggctgtagtagaaataccaaaagactagaggagatttcccaactttacactgggtcctttaaagggggtgtgggctctgggtgaa

SEQ ID NO: 52598 - DNA, 201 bp, Homo sapiens
agagaagggaaggactaaaggtgggacatagaggacacatgtctgtcacgggacaatgtctcctgccttcttgtgatcacaggactcagacttacgcctartggtaggagacagcttgaaagcagagaaggagctaacagcatcagtcactgaggtaagtgggagtaagagtttggtggaaaggcccaagatttctgggga

SEQ ID NO: 52599 - DNA, 201 bp, Homo sapiens
ccctgatgaggaagggccatagagcaaagagctaaggatcatcagcaaaggcccgctgggcattggggaagcgctggggactgtagttggggtcttcctgyagtcgtttttgtatatcagaccggagctaaagagaaaaagtaagcaggttggagaaacgctggccaagtccctatgatcccagcaagcacacaaggccat

SEQ ID NO: 52600 - DNA, 201 bp, Homo sapiens
tccgcctccctggttcaaggaattctctgcctcagcttcccgagtagttgggattacaggcgcccgccaccacgtagggcaaatttttgtatttttagtaraaatggggtttcatcatgttggccaggctggtcttgaactcctgatctcgtgatccacctgcctaggcctcccaaagtgctgggattacaggcgtgagcc

SEQ ID NO: 52601 - DNA, 201 bp, Homo sapiens
tcagcaaaggcccgctgggcattggggaagcgctggggactgtagttggggtcttcctgcagtcgtttttgtatatcagaccggagctaaagagaaaaagyaagcaggttggagaaacgctggccaagtccctatgatcccagcaagcacacaaggccatccctcagaagctaacatttccccccccaagcacactgtcaa

SEQ ID NO: 52602 - DNA, 201 bp, Homo sapiens
gtgctttgggagtgttaggtgagaggatcgcttgaagccaggagttcaagaccagcctgggcaacacagcaagaccccccacctctacaaaaaaaaaaaawttttttagttgggtgtggactgtgcatctgtggtcccagctactctggaggttgtggtgggaggatcagttgagcccaggagttggaggtcacagtgagc

SEQ ID NO: 52603 - DNA, 201 bp, Homo sapiens
aatgtctcctgccttcttgtgatcacaggactcagacttacgcctagtggtaggagacagcttgaaagcagagaaggagctaacagcatcagtcactgagrtaagtgggagtaagagtttggtggaaaggcccaagatttctggggaagattgctgggagtgaccagggcgtccaggatgccagacatccctctccacgag

SEQ ID NO: 52604 - DNA, 201 bp, Homo sapiens
ggcattggggaagcgctggggactgtagttggggtcttcctgcagtcgtttttgtatatcagaccggagctaaagagaaaaagtaagcaggttggagaaasgctggccaagtccctatgatcccagcaagcacacaaggccatccctcagaagctaacatttccccccccaagcacactgtcaaatagcccggggtggcac

SEQ ID NO: 52605 - DNA, 201 bp, Homo sapiens
cagttgagcccaggagttggaggtcacagtgagctatgatcgtgccactgaactccatcctgggcaacagagcgagacttttaaaaggaaaaaaaaaaaaragtaggggaggatggatggggaataccaagtccttgcaaagtggtgagaggagtaagaatgacaagacttcattggtggatctagacttcggagggaagg

SEQ ID NO: 52606 - DNA, 201 bp, Homo sapiens
tctggcttcctaacagcttttctccccacaatttattttcagatcacagcccctatacctaccccccggcccagcccctccctcagcactgctctctgggktagctctcaagggccagtttctggatttctccacaatgcaagctacagagctggggaagttgccggctggaggagttctctaccctccaccttccttcct

SEQ ID NO: 52607 - DNA, 201 bp, Homo sapiens
ggctcatgatcaaccaatctcacataaaagtattgaatgttacatatctcagccttcttgatagggatttcatagattttttttttttttttttttttttkagaccaagtttagctcctgttgcccaggctggagtgcaatggtgtgatcttgacttaccacaacctccacctcctgggtttaagcgattatcctgcctca

SEQ ID NO: 52608 - DNA, 201 bp, Homo sapiens
acatgaggtcaggagttcaagatcagcctggccaacatagtgaaacccgtctctactaaaaatacaaaaattagccaagtgtggtggcatgtgcttgtagycccagctgcttgggaggctgaggtagtagaatcgctttaacccgggaggcagagatttctgtgagccaagaccatgccattgcactccagcctgggtgac

SEQ ID NO: 52609 - DNA, 201 bp, Homo sapiens
caacatagtgaaacccgtctctactaaaaatacaaaaattagccaagtgtggtggcatgtgcttgtagtcccagctgcttgggaggctgaggtagtagaaycgctttaacccgggaggcagagatttctgtgagccaagaccatgccattgcactccagcctgggtgacagagcaagactctgtctcaaaaaaaaatcctg

SEQ ID NO: 52610 - DNA, 201 bp, Homo sapiens
acatagtgaaacccgtctctactaaaaatacaaaaattagccaagtgtggtggcatgtgcttgtagtcccagctgcttgggaggctgaggtagtagaatcsctttaacccgggaggcagagatttctgtgagccaagaccatgccattgcactccagcctgggtgacagagcaagactctgtctcaaaaaaaaatcctgtc

SEQ ID NO: 52611 - DNA, 201 bp, Homo sapiens
gcaaggcccggacctactgggaacaagagatggaagagctgacttgaccgcgaggggagatgctttttgggctggagggcttgtgacatgaataggattawttttctttttctttggtttcttcaggcctagttccccgagagcgttcagacagtgggggctcaagctcagagccatttgaccgtcatgcacctgctatgt

SEQ ID NO: 52612 - DNA, 201 bp, Homo sapiens
gccggcccccacccatgcccccaatgaactttgatccccgatggatgatgattcctccttatgtggacccccggctcctccagggtcgtccccctctagasttctaccctcctggtgtgcatccctctggtaagggggcatgggaggagtgagaaacaggaaagtcccctcagtcttaggcattggatattagggtcttac

SEQ ID NO: 52613 - DNA, 201 bp, Homo sapiens
aatactcatatttcccctcaggggcccatgaagaggttgactacactgaaaagctcaagttcagcgatgaggaagatgggcgagactctgatgaggagggwgctgagggccagtgagttagggccatcaggggagaagaggagggggtcttggtttgtattttggtaatatactcttagaggagtatattagttgcagctg

SEQ ID NO: 52614 - DNA, 201 bp, Homo sapiens
agacaccagagggcctcatatctgagtccctaatgataatgcaatggagtttttaagtttctgttatggtctgtacaggggacagagactgagacacttgmtgtctggcccacaggctctggcacgttttgggggaggtgcctgcaggacccaacatactcaatgagcttccagcgcaatgtccgatcgctcggggccgac

SEQ ID NO: 52615 - DNA, 201 bp, Homo sapiens
tctcgcatgtggttatacaacatgccatatttcattttcttttttgtgtacagccgttttccccgtgtggcgggcccccgaggctcagggccaccaatgcrcttagtagagcctgtgggtcgtccctctattctcaaagaggataatctcaaagagtttgatcagttggatcaggagaatgatgatggttgggcaggtaag

SEQ ID NO: 52616 - DNA, 201 bp, Homo sapiens
acacgccaacacacccagctaattttttgtgtgtttttagtagagatggggtttcacatgttggccaggatggtctcgatctcttgacctcgtgatccgcycgcctcagcctcccagagtgctgggattacaggcgtgagccaccgcgcccagccagagtcttccacttttatagcatgtcctcaggaaatgtcttctgtc

SEQ ID NO: 52617 - DNA, 201 bp, Homo sapiens
gaaggcgggaaacctgatggtctggtacctgtcagagccttccactttttttttttttgagacggagtctcattctgtcacccaggctggagtgcagtggygcaatctcggctcactgcaacctctgcctcctgggttcaagcgattttcctgcctcagcctccagagtagcgggactacaggcacacgccaacacaccca

SEQ ID NO: 52618 - DNA, 201 bp, Homo sapiens
tgcccgcgtctactgccttcccacggtgttccagcagaacggcacaactaacccacagccaaacacacacacacacacacacacacacacacacacacacmcacccaccaccccgcggctccgcccccgacttccccacggaccgtcacttccggtctcccccaaacctgccaccgacggccacttccgtttccccgatag

SEQ ID NO: 52619 - DNA, 201 bp, Homo sapiens
ttcatggaggcacatgagcaagtttaagtctcagtcttatatgatggagtgtagtggtgccagaactgacctccttggggaataagcagttattctgtagsggggtgagtttgaaggcgggaaacctgatggtctggtacctgtcagagccttccactttttttttttttgagacggagtctcattctgtcacccaggctg

SEQ ID NO: 52620 - DNA, 201 bp, Homo sapiens
cttcctctgtatttccctctgcattaagttctatccatgtggaggacagaacaaaatcagcctcactcacaaaacatcagaaaacgttctactggaatacraacaaagggatcaataaaaagaaaatctgaggccaggtgcggtggctcatgcctgtaataccagcactttgggaggccgaggagggcacatcacctgagg

SEQ ID NO: 52621 - DNA, 201 bp, Homo sapiens
ccttgttaaatgactaaggaatggtactaaactttagctttttgtcttggagagagagcatgaaaaaatagacaacagcctacaaaggatgacaaaattawtttgtccttatatttgtaaatggtagcaatgggcatgatttcagtcctgagtctccaccagttggagaagtcagggaggcatctcaggtgtgaataacct

SEQ ID NO: 52622 - DNA, 201 bp, Homo sapiens
ctaccagatgtcagatcactgcttcaaggtgcttaaaggtgcagggtggtaaggctggggataaatgaagtagaaggcagttgttttggtttattggactrtcagtgatagtgttctatcatttgtatatctgaaggagggaaggttttgtctggaatcttaggttgtagtctaataccatttcttggcagagtactgtag

SEQ ID NO: 52623 - DNA, 201 bp, Homo sapiens
ctctaaagaagaacgaaggaaggaaggcccgctgttgcccagaccagagtgtacccgaaagactccctagcattaatccctgccccaatacctaaaaagtwtctcctgcacacacacacattcacacctgtccccatcccccttctgattccggggcacagggagagaaacacaaagggcaggagatcgacggcttaggga

SEQ ID NO: 52624 - DNA, 201 bp, Homo sapiens
aactagactccctgaaggcatggctctgcaattttatctccgactcgctagcaactagcataagactgacacaaattagatgcataataagcatctgtaatttttttttttttttttgagacagagtctcgctctgttgcccaggctggagtgcagtggcatgatctcagctcactgtaacctccgcctcccaggttcaag

SEQ ID NO: 52625 - DNA, 201 bp, Homo sapiens
cgccccacactctgcggagaaagtggtttcgcgcacgcgcgccacgcccatcgaaccctcctaactcactatagacccgaaacggcactcacggggcgacrgacctgctagctgactgcccgcgtctactgccttcccacggtgttccagcagaacggcacaactaacccacagccaaacacacacacacacacacacaca

SEQ ID NO: 52626 - DNA, 201 bp, Homo sapiens
taaagggggtgtgggctctgggtgaacaccagttatcctcctacaaaggcgtgtctgtggttccctgtctttggacacgtaagaattggaggaaaataaakgtggatttgggaaactttgaggccagcttgcttcttgcaggctcatgatcaaccaatctcacataaaagtattgaatgttacatatctcagccttcttga

SEQ ID NO: 52627 - DNA, 201 bp, Homo sapiens
aaagaatgcaggcaggacaaaaacacatgtccaaacaaggtactcaggcccatgacagatttcatgaagagcaaggaataccatgaaccaacattctccaycactataagctttgtcactttgacaaatcactcagcctctgtgaggcttttttctaaaaatggggataaagtgacctatgctattgtgcctgacatatca

SEQ ID NO: 52628 - DNA, 201 bp, Homo sapiens
tgctggatttttacttagatttccttgacaaaggtgtctgggggaaaggagggaacatggcatttgagctatgagggagctaagtagatcatggttgcttragaagagtgggcagtttacatagactggaggaaaagacaccagagggcctcatatctgagtccctaatgataatgcaatggagtttttaagtttctgtta

SEQ ID NO: 52629 - DNA, 201 bp, Homo sapiens
gctgatcctgctcttctcgccagcaactattctcaccttgaatgttcatgtgcatcatgaccacgggttccacactctggtgggaaatccggatgaccctygggtggctggtggctggcgggggagctggacctggcgggggagccccctcagctgaggactcgacattggtagaagacggagccacggatgaggcctgcc

SEQ ID NO: 52630 - DNA, 201 bp, Homo sapiens
cctcctctttatgcaaataacctccgcatgctccgcgcgcccggcccttttttttttttttttaaactaaagacagccctggaagtagagggttagggtakaaagtgccccgccctttatgcaaattaaggggcgtgtctaggcgcggagggaggtgggaggtgggagggggtgctcccgggggcggcggttgcccggatg

SEQ ID NO: 52631 - DNA, 201 bp, Homo sapiens
ctccacattatctggcccctcaacctccccctctctagagtacctgaggctcaggggaagctctttctgctccctgaacttccattggctcctcaggaagyggctgtgaaattaaagaacaccatacttcctctcagatctctccagttctctcaagtaccctgaccccatcgcccaacaggtcccttacctgggggggat

SEQ ID NO: 52632 - DNA, 201 bp, Homo sapiens
tagaactgcccgaagaatgcctacgctgcgtggtgcggacgaaacgcttcccggggcctttggattggtctgtctagccacctcatttgcatgacgtaatwtaataactggaaggccccgcccctctggtgcatttccccgctccaaccacctcctcaaactcacggcaaagggatgcgagagctggaactcttaccaggc

SEQ ID NO: 52633 - DNA, 201 bp, Homo sapiens
ccacacctggctgaacctgcaccaaggactgagagacaagataacacaaagatcccaaaatcaagaatcataagactgggagtggaggaggcagctgcctygaccagacccaggagaggaaaggaatagagaagggttactcacaaaactctcccgcacatactcttctagccccgtgatcaatgtgtgggttgccatctg

SEQ ID NO: 52634 - DNA, 201 bp, Homo sapiens
aaaatacaaaaattagccaagtgtggtggcatgtgcttgtagtcccagctgcttgggaggctgaggtagtagaatcgctttaacccgggaggcagagattyctgtgagccaagaccatgccattgcactccagcctgggtgacagagcaagactctgtctcaaaaaaaaatcctgtctcacaagaaatacataaataaaaa

SEQ ID NO: 52635 - DNA, 201 bp, Homo sapiens; identical to SEQ ID NO: 9210

SEQ ID NO: 52636 - DNA, 201 bp, Homo sapiens; identical to SEQ ID NO: 9211

SEQ ID NO: 52637 - DNA, 201 bp, Homo sapiens
gcacttagggaggccgaggtgggcagatcaactgagttcaggagttcgagaccaccatggctaacgtggtgaaaccccatttctactaaaaatacaaaaaagtagccggcgtggtggcgctcgcctgtagtcccagctactcgggagactgaggcaggagaaacgcttgaacccaggaggtggaggttgtagtgagccgag

SEQ ID NO: 52638 - DNA, 201 bp, Homo sapiens
aaagataagtttgggtggagtggagattgtggcctgaggggccatgggctctagaatgtcagtaggatttccatgtctggctaaggcaactggaaagcggytggtagggtgttagagtcaagaacacccacctatgtattcattgctggttctttgctttccagtctgtgcatctgtatgcataggaacccttagaaggac

SEQ ID NO: 52639 - DNA, 201 bp, Homo sapiens
cacttagggaggccgaggtgggcagatcaactgagttcaggagttcgagaccaccatggctaacgtggtgaaaccccatttctactaaaaatacaaaaaagtagccggcgtggtggcgctcgcctgtagtcccagctactcgggagactgaggcaggagaaacgcttgaacccaggaggtggaggttgtagtgagccgaga

SEQ ID NO: 52640 - DNA, 201 bp, Homo sapiens
acttagggaggccgaggtgggcagatcaactgagttcaggagttcgagaccaccatggctaacgtggtgaaaccccatttctactaaaaatacaaaaaagtagccggcgtggtggcgctcgcctgtagtcccagctactcgggagactgaggcaggagaaacgcttgaacccaggaggtggaggttgtagtgagccgagat

SEQ ID NO: 52641 - DNA, 201 bp, Homo sapiens; identical to SEQ ID NO: 9214

SEQ ID NO: 52642 - DNA, 201 bp, Homo sapiens
cccccaccccgctgagggagttcctcttgccccctacccccggggcttgtatatagattataaatatataagggggaaaggggtgggcggggaggggttgyggggctggggcctcacttcccctcctcccccttcccctggtcccctgtccctggggctgtttgttaaaaaagagtaataaaaggatttaaaaaaaaaaac

SEQ ID NO: 52643 - DNA, 201 bp, Homo sapiens
cttttttgtgccagtgagcgaggtcaactggttatcagtctgcagctgacacctgggctggtcccaatatggcttcctttgcatatctagggccttggtgrgacatctgtaacattactgggttatcaaccagtgtcttcacatggactctccagcaggcctgttaaatgtccgtgagctcatgttccaagaggtctagct

SEQ ID NO: 52644 - DNA, 201 bp, Homo sapiens
aaacggagcttctcaagtcagcggccaggcatggaacggcagaatcggcgccctggcccagggggcaaggctggcagcagtggcagcagcagtggaggagscggtgggggtcctggaggaaggaccgggccaggacgaggcgacaagaggagctggccctctcccaagaaccgaaggtgggtaggaacaaacaaatttatt

SEQ ID NO: 52645 - DNA, 201 bp, Homo sapiens
gaggctgaggcaggagaatcacttgaacccgggaggcagaggttgcagtgagccaagattgtacactgcactccagcctagcaacagagtgagactccatytcaaaaaaaaaaaaaaaaaaaaaaaaaaaagctgaaacctgaagacacaagacactacagcagccccattccaggaaagcaggaaccaagaaaatatgga

SEQ ID NO: 52646 - DNA, 201 bp, Homo sapiens
gagactccatctcaaaaaaaaaaaaaaaaaaaaaaaaaaaagctgaaacctgaagacacaagacactacagcagccccattccaggaaagcaggaaccaasaaaatatggaaagaactggaaagtgccagtgagcagactaggaaaggagtttaaactctgagtggggaagaatgaaaactcacccacaaggactggctgc

SEQ ID NO: 52647 - DNA, 201 bp, Homo sapiens; identical to SEQ ID NO: 9705

SEQ ID NO: 52648 - DNA, 201 bp, Homo sapiens
ccaatcagaaagcctgcctttccctccatctaaacagggagaggtactcccttcaccacacaaacacacctccaaagacaaaccaacccccacaccccccwcatctgtctacttaagcttctgctctggtccccaggctaccaccaccagcatgtgcctctcccttccccaccctgttccctcacacctcagcatgaacct

SEQ ID NO: 52649 - DNA, 201 bp, Homo sapiens
tctcttcaacctccgcctcccaggttcaaacgattctcctgcctctgcctcccaagtagctgggattaagttgcctgccaccacacccggctaatttttgktttttttttttttttttttttttgagacagagtctcgctctatcacccaggctggagtgcagtggtgcgacctcagctcactgcaagctccgtctcctgg

SEQ ID NO: 52650 - DNA, 201 bp, Homo sapiens
acctcattttcttcatctttaaaatgaaaggttcagagtcaatgaattcccagggccccttcccctaacatgtcactaggggctcttacccagtggttatrtaatggcaagaaggtaccactgcctggctgggccgggggacaggaagatgaggtgaatggcaagccagccactcacctgcaagaagtcagtcatgccttg

SEQ ID NO: 52651 - DNA, 201 bp, Homo sapiens
tggctgcataagaagctgccccacaaggccgctcaccatctgggccaacgaggcattggtacccagaccggcgccctgctggatagagagcaagggagaayttcagacctgcccttccatgcaccaccacaggagtctctccctagactgttacgcactagaactccccgacccttgctcaccagtgtcccagagactggg

SEQ ID NO: 52652 - DNA, 201 bp, Homo sapiens
cactggtgatggacatttttaatgaggataggaaaacgaagatggctctggccttggccctctgttttctggcccatggttacagggtgctaaggtggctycataatgctttttctcagttcttcatatggtaaaacagtatttcatctggaggcgattttttccaggagccaatacaggagcaagtttaggaaaagatgg

SEQ ID NO: 52653 - DNA, 201 bp, Homo sapiens
ggaggccaaggcatgagaactgcttgagcccaggagtctaggccacatagcaagaccccatctctaccagaaaaaaaaaaagacaattactagccaggagmtagtactgctagctactcaggaggctgaggtgggagaactgtttgagcccaggagttcaaggttacagtgagctttaactcactggattgcaccactgca

SEQ ID NO: 52654 - DNA, 201 bp, Homo sapiens
ccacatgaggcattttcgaccctctctccgtcttgttctccagttgcccctcgccatggcctgcagagtctcgggaaagttgccattgcccggcgtatgcsacctccagccaaccttccaagcctgaaagccgagaacaaaggcaatgaccccaatgtctcactagtgccaaaagacggaacaggatgggcaagcaaacag

SEQ ID NO: 52655 - DNA, 201 bp, Homo sapiens
tcccaactttacactgggtcctttaaagggggtgtgggctctgggtgaacaccagttatcctcctacaaaggcgtgtctgtggttccctgtctttggacaygtaagaattggaggaaaataaatgtggatttgggaaactttgaggccagcttgcttcttgcaggctcatgatcaaccaatctcacataaaagtattgaat

SEQ ID NO: 52656 - DNA, 201 bp, Homo sapiens
acaggagtaaagacacagatagctatgtccaaggctttaagctcaagagactcaagctatgccataaaaattagtaatttcactcaacagtctatcaaggmcctatctccattatgggttctgatttctaccctttaaaaacacagcatagacctgaccaatgtctatcagtaagacacacttgcttagggttcctgtgct

SEQ ID NO: 52657 - DNA, 201 bp, Homo sapiens
tgactaaggaatggtactaaactttagctttttgtcttggagagagagcatgaaaaaatagacaacagcctacaaaggatgacaaaattaatttgtccttrtatttgtaaatggtagcaatgggcatgatttcagtcctgagtctccaccagttggagaagtcagggaggcatctcaggtgtgaataaccttcccattctg

SEQ ID NO: 52658 - DNA, 201 bp, Homo sapiens
tagaaggcagttgttttggtttattggactatcagtgatagtgttctatcatttgtatatctgaaggagggaaggttttgtctggaatcttaggttgtagyctaataccatttcttggcagagtactgtagctcacgcctataatcccaacacttagggaggcttggggtggaggatcgcttgagcctagggagtttgaga

SEQ ID NO: 52659 - DNA, 201 bp, Homo sapiens
cattaagttctatccatgtggaggacagaacaaaatcagcctcactcacaaaacatcagaaaacgttctactggaatacgaacaaagggatcaataaaaakaaaatctgaggccaggtgcggtggctcatgcctgtaataccagcactttgggaggccgaggagggcacatcacctgaggtaaggagttcgagaccagcct

SEQ ID NO: 52660 - DNA, 201 bp, Homo sapiens
cctccgcctcccaggttcaaacgattctcctgcctctgcctcccaagtagctgggattaagttgcctgccaccacacccggctaatttttgtttttttttkttttttttttttttgagacagagtctcgctctatcacccaggctggagtgcagtggtgcgacctcagctcactgcaagctccgtctcctgggttcacacc

SEQ ID NO: 52661 - DNA, 201 bp, Homo sapiens
actttttttttttttgagacggagtctcattctgtcacccaggctggagtgcagtggcgcaatctcggctcactgcaacctctgcctcctgggttcaagcrattttcctgcctcagcctccagagtagcgggactacaggcacacgccaacacacccagctaattttttgtgtgtttttagtagagatggggtttcacatg

SEQ ID NO: 52662 - DNA, 201 bp, Homo sapiens
tagaagctagtggacttaaggcattgctaggactctggcttcctaacagcttttctccccacaatttattttcagatcacagcccctatacctaccccccrgcccagcccctccctcagcactgctctctggggtagctctcaagggccagtttctggatttctccacaatgcaagctacagagctggggaagttgccggc

SEQ ID NO: 52663 - DNA, 201 bp, Homo sapiens
ccttttgaggatgtggctggcacagaagtgagtgagggtgggagggtgtgtctgagctgggacttttttgagcactggtcataccccccacctgctctggkttgagtctggagctgttctctcacttggctgtcccctttctgcagtttgtatgtgtgcatcagtcaggtattggggtgctttctaccctgacttaactag

SEQ ID NO: 52664 - DNA, 201 bp, Homo sapiens
ccaatgcactttactgtgtgcccaatccaggagctgccccgggagcagcctctgccccctggccccattggcacagaacgatcacagcgtacagaccgagscacagagcctggccccattcggccatcccatcgacctggtcccccagtccagtttggcactagtgacaaggtctgtgtgggctggatctgggtatcctga

SEQ ID NO: 52665 - DNA, 201 bp, Homo sapiens
ttttttttgagacagagtctcgctctatcacccaggctggagtgcagtggtgcgacctcagctcactgcaagctccgtctcctgggttcacaccattctcstgactcagcctcccgagtagctgggactacaggtgcccgccaccatgcccagctaattttttgtatttttagtagagacggggtttcatcatgttagcca

SEQ ID NO: 52666 - DNA, 201 bp, Homo sapiens
aaaaatcagctgggtatagtggcacacgcctataatcccagctactcaggaggctgagataggaaaatcgcttgaacccaagaggtggaagtttcagtgartcgagatcgcgccactgcactccagcctggaagacagggcgtgactccatctcaaaaaaaagaaaaaaaaagaaaatctggtgaccagaaaatcaagctc

SEQ ID NO: 52667 - DNA, 201 bp, Homo sapiens
gggttgatatatttctccctgtttcccgacaggtacgccaggatctgccatccccttcggatttttattctactcctctgcagcctggtggccaaagtggmtttctcccttcaggggctcctgcccagcaggtatattgtatcttcacacttccccttcatttgatttctctgtccagttgctggctttgattttccctgg

SEQ ID NO: 52668 - DNA, 201 bp, Homo sapiens
cacctggaatatgctcccaactcaaaatacaggttttttatttatatataaagtgctttcgcacaaaaaatacaaacatcaggctgggcgcggtggcccasgcctgtaattccagcactttgggaggccaaggcgggtggatcacaaggtcaggagttcgagaccagcctggccaatatggtgaaaccctgtctctactaa

SEQ ID NO: 52669 - DNA, 201 bp, Homo sapiens
gccattgcactccagcctgggtgacagagcaagactctgtctcaaaaaaaaatcctgtctcacaagaaatacataaataaaaatgaaaactatttcctatrggccaagactgaagaaagtactgttgttctaatggtttcatagaaagttaatgccaccaccataggctcatgagaggccatgaagtgctttaatgggtct

SEQ ID NO: 52670 - DNA, 201 bp, Homo sapiens
gcctcagttctggtaagctggaggggttatgggtgggaatatctccatccccagagaaggtcaagtgctggagggagcgggtggagaacctggcctagggrccctgctgctgggtgcgtttctgcagggagcaagggtagaagaattgggaggtggagtagagaggaaaagttagggtcagtggcagagccaggcagatgc

SEQ ID NO: 52671 - DNA, 201 bp, Homo sapiens
tttgtccagttgtctccattgtcacgccaatttcccctagtccaagttttttctttgctgattcctttgtccatgtgtgctttgagcctctctcatcttgyctttcctcctttcctaggagcagctcctgaagcagcagcagcagcaccagtggcagcagcatcaacagggctctgcccctcctaccccagtgcccccatc

SEQ ID NO: 52672 - DNA, 201 bp, Homo sapiens
tggggagttacattctgatcttcactgcttaaagcagaagtatggtaggtatttaacagagtcaggcagcacaacttacctacctcttcctctgaacaggytgtcagaaagcagtgacactaattactatactttctttttctaaacctcattttcttcatctttaaaatgaaaggttcagagtcaatgaattcccagggc

SEQ ID NO: 52673 - DNA, 201 bp, Homo sapiens
gtgtgcatccctctggtaagggggcatgggaggagtgagaaacaggaaagtcccctcagtcttaggcattggatattagggtcttactgtgactctggtaygataggttttgcccatcatagtgatgagggaagggcatatgcttggcactgctgagatagctctgttgcaaaaatgggcttagttaagaaataagcagtg

SEQ ID NO: 52674 - DNA, 201 bp, Homo sapiens
ttctggtaagctggaggggttatgggtgggaatatctccatccccagagaaggtcaagtgctggagggagcgggtggagaacctggcctaggggccctgcygctgggtgcgtttctgcagggagcaagggtagaagaattgggaggtggagtagagaggaaaagttagggtcagtggcagagccaggcagatgctgaccct

SEQ ID NO: 52675 - DNA, 201 bp, Homo sapiens
ccaaagaatcctgggggacaagggcagatgttagcaatggcctttaccacctggcctgcccacccacaaccagatcatcaacctcatcccaccttggcaayacccctaaaccaaggccatctacattcctctggctgccccttcctggagcaagccaaagcatcctttttgctcaccaagggccccatcagctccaggctc

SEQ ID NO: 52676 - DNA, 201 bp, Homo sapiens; identical to SEQ ID NO: 9208

SEQ ID NO: 52677 - DNA, 201 bp, Homo sapiens
gattctcttgtagggaatctgagtggataaccttgttatataagagcaggcaaggcccggacctactgggaacaagagatggaagagctgacttgaccgcraggggagatgctttttgggctggagggcttgtgacatgaataggattatttttctttttctttggtttcttcaggcctagttccccgagagcgttcagac

SEQ ID NO: 52678 - DNA, 201 bp, Homo sapiens
taccccccacctgctctgggttgagtctggagctgttctctcacttggctgtcccctttctgcagtttgtatgtgtgcatcagtcaggtattggggtgctytctaccctgacttaactagctccttctccactcctctcagatgagtcagtctgacagtggggtggacctgagtggggattctcaggtgtcatcaggtccc

SEQ ID NO: 52679 - DNA, 201 bp, Homo sapiens
gaaaaagtaagcaggttggagaaacgctggccaagtccctatgatcccagcaagcacacaaggccatccctcagaagctaacatttccccccccaagcacrctgtcaaatagcccggggtggcactgtcaagccttcccagatgccaaaggggaaaacaaatggtagcaccaggctgaccagttcatcgctgaagggatcc

SEQ ID NO: 52680 - DNA, 201 bp, Homo sapiens
tctactaaaaatacaaaaaagtagccggcgtggtggcgctcgcctgtagtcccagctactcgggagactgaggcaggagaaacgcttgaacccaggaggtkgaggttgtagtgagccgagattgtgccatcgcactccagcttaggcaacgagcgaaactccgtctcaaaaatgaatgaatgaatagcacaactccatctc

SEQ ID NO: 52681 - DNA, 201 bp, Homo sapiens
ggccaggacgaggcgacaagaggagctggccctctcccaagaaccgaaggtgggtaggaacaaacaaatttattgtggtttaaaaattggaggagggggaraaagcctgagggaaagataagtttgggtggagtggagattgtggcctgaggggccatgggctctagaatgtcagtaggatttccatgtctggctaaggca

SEQ ID NO: 52682 - DNA, 201 bp, Homo sapiens
ctggggactgtagttggggtcttcctgcagtcgtttttgtatatcagaccggagctaaagagaaaaagtaagcaggttggagaaacgctggccaagtcccyatgatcccagcaagcacacaaggccatccctcagaagctaacatttccccccccaagcacactgtcaaatagcccggggtggcactgtcaagccttccca

SEQ ID NO: 52683 - DNA, 201 bp, Homo sapiens
tctgccatccccttcggatttttattctactcctctgcagcctggtggccaaagtggctttctcccttcaggggctcctgcccagcaggtatattgtatcktcacacttccccttcatttgatttctctgtccagttgctggctttgattttccctggttttctgacattcctccctgcccccaacatgcacacccaaatt

SEQ ID NO: 52684 - DNA, 201 bp, Homo sapiens
cagctcatgatttttttcccctcagctgcatccagtggaactaaagccgttccaggattatcaaaaactgagcagcaaccttgggggacctggatcatcayggactcccccaactggaaggtgaaacggaatagggatgtggactttccaagtgcttccttactttggaaccagggtctggatcctaggcttgccttagac

SEQ ID NO: 52685 - DNA, 201 bp, Homo sapiens
acaggctgtcagaaagcagtgacactaattactatactttctttttctaaacctcattttcttcatctttaaaatgaaaggttcagagtcaatgaattccyagggccccttcccctaacatgtcactaggggctcttacccagtggttatgtaatggcaagaaggtaccactgcctggctgggccgggggacaggaagatg

SEQ ID NO: 52686 - DNA, 201 bp, Homo sapiens
tttccaagtgcttccttactttggaaccagggtctggatcctaggcttgccttagacgcccttcttcccttaggtccttctctggcctcaattcccgtctsaaggccacgccttccacctacagtggagtcttccgcacccagcgcgtcgacctttaccagcaggtgaaggagaaacccttgtggccccaactctaaattc

SEQ ID NO: 52687 - DNA, 201 bp, Homo sapiens
tgagataggaaaatcgcttgaacccaagaggtggaagtttcagtgagtcgagatcgcgccactgcactccagcctggaagacagggcgtgactccatctcaaaaaaaagaaaaaaaaagaaaatctggtgaccagaaaatcaagctcatctctcaggctaaggggcctaaacgaggaaaagctaaaggtgtcttccagaac

SEQ ID NO: 52688 - DNA, 201 bp, Homo sapiens
tacttcacttaggattccccacccactaaagattccctccatctctcacttgggtgcatttgtttccggggcaggtgttgggcccgctggggctgggccakgagtgagctccgggttctgggctggggcacgctcctccacttcttctgcctccatgggctcccggggaggtgcttcactttcaactggttctgatgtttg

SEQ ID NO: 52689 - DNA, 201 bp, Homo sapiens
gactgcccgcgtctactgccttcccacggtgttccagcagaacggcacaactaacccacagccaaacacacacacacacacacacacacacacacacacacacacacccaccaccccgcggctccgcccccgacttccccacggaccgtcacttccggtctcccccaaacctgccaccgacggccacttccgtttccccga

SEQ ID NO: 52690 - DNA, 201 bp, Homo sapiens
actgcccgcgtctactgccttcccacggtgttccagcagaacggcacaactaacccacagccaaacacacacacacacacacacacacacacacacacacmcacacccaccaccccgcggctccgcccccgacttccccacggaccgtcacttccggtctcccccaaacctgccaccgacggccacttccgtttccccgat

SEQ ID NO: 52691 - DNA, 201 bp, Homo sapiens; identical to SEQ ID NO: 28527

SEQ ID NO: 52692 - DNA, 201 bp, Homo sapiens; identical to SEQ ID NO: 28528

SEQ ID NO: 52693 - DNA, 201 bp, Homo sapiens; identical to SEQ ID NO: 9218

SEQ ID NO: 52694 - DNA, 201 bp, Homo sapiens
tctaataccatttcttggcagagtactgtagctcacgcctataatcccaacacttagggaggcttggggtggaggatcgcttgagcctagggagtttgagmccagcctgggcaacaaagcaagaccctgtcggccaggcatggtggctcacacttgtaatcccagcactctgggaggccgaggcgggcagaacatgaggtc

SEQ ID NO: 52695 - DNA, 201 bp, Homo sapiens
cttccacctacagtggagtcttccgcacccagcgcgtcgacctttaccagcaggtgaaggagaaacccttgtggccccaactctaaattcgagttgccacytgatttcctgtccttccgtctcatcgctgacctctcactgtgactcactctttaacacatgcctgtcccctaggcctccccaccagatgccctgcgctgg

SEQ ID NO: 52696 - DNA, 201 bp, Homo sapiens
ggagatgctttttgggctggagggcttgtgacatgaataggattatttttctttttctttggtttcttcaggcctagttccccgagagcgttcagacagtsggggctcaagctcagagccatttgaccgtcatgcacctgctatgttacgggaacggggcactccaccggtggatccaaagttggcctgggtaggagatgt

SEQ ID NO: 52697 - DNA, 201 bp, Homo sapiens
aaaaagctgaaacctgaagacacaagacactacagcagccccattccaggaaagcaggaaccaagaaaatatggaaagaactggaaagtgccagtgagcaractaggaaaggagtttaaactctgagtggggaagaatgaaaactcacccacaaggactggctgcataagaagctgccccacaaggccgctcaccatctgg

SEQ ID NO: 52698 - DNA, 201 bp, Homo sapiens
cttatttccattctttctgtctgtctcttcaggagcgagactcctccagtacctcccccaccaccctatctggccagttatccaggctttcctgagaatgragcccctgggcccccaatctctcgctttcctctggaggaaccagggccccgtccactcccctggcccccaggcagtgatgaagtggccaagatacaaact

SEQ ID NO: 52699 - DNA, 201 bp, Homo sapiens
cgaacccggcgccatccgccgccatcctcccccgccccaccgccatcccgtcccggggagcccctaggcccgggtcccggatccccgcgcacccggccagktgagtctgggtgaaccgtgcgctgacgcccttttccggcgcgggagaggtggtggcggtggcggtggcggcggcggcggcggtggtgggccggggggagg

SEQ ID NO: 52700 - DNA, 201 bp, Homo sapiens
cgccatcctcccccgccccaccgccatcccgtcccggggagcccctaggcccgggtcccggatccccgcgcacccggccaggtgagtctgggtgaaccgtkcgctgacgcccttttccggcgcgggagaggtggtggcggtggcggtggcggcggcggcggcggtggtgggccggggggaggagaagctgccattagccgc

SEQ ID NO: 52701 - DNA, 201 bp, Homo sapiens
ccatcctcccccgccccaccgccatcccgtcccggggagcccctaggcccgggtcccggatccccgcgcacccggccaggtgagtctgggtgaaccgtgcsctgacgcccttttccggcgcgggagaggtggtggcggtggcggtggcggcggcggcggcggtggtgggccggggggaggagaagctgccattagccgccg

SEQ ID NO: 52702 - DNA, 201 bp, Homo sapiens; identical to SEQ ID NO: 9704

SEQ ID NO: 52703 - DNA, 201 bp, Homo sapiens
tcaacaacgctatagtgtgtccactacagcagatggtttcacgcaccaagggggattccagctgtgtaagacagccttaacctcaaagaatgcaggcaggwcaaaaacacatgtccaaacaaggtactcaggcccatgacagatttcatgaagagcaaggaataccatgaaccaacattctccaccactataagctttgtc

SEQ ID NO: 52704 - DNA, 201 bp, Homo sapiens
ttcaccaacacctccaagctgtcaggctcctccacagcggtactggtactatcattaggctccatggccgacaggtctctaaagaagaacgaaggaaggarggcccgctgttgcccagaccagagtgtacccgaaagactccctagcattaatccctgccccaatacctaaaaagtttctcctgcacacacacacattcac

SEQ ID NO: 52705 - DNA, 201 bp, Homo sapiens
aagccaccacgcccggcctcatatctcttaataagagtttttctagaaacatttctcaatcaccccaggcataatcatattttatttctctacttctttcttttttttttttttttgagatagagtttcgctcttgttgcccaggctggagtgcaatggcacgatcttggctcaccacaacctccgcctcccaggttcaag

SEQ ID NO: 52706 - DNA, 201 bp, Homo sapiens
acaatggtgaaagactaattctaagaaagagagcaggccttcgtgaactcagaggagaattccgatcaggctcaggagataccatttggatttccttgccrtagggagagcagcagttcttctcagctgcctgtcctagcgtcatttacctataccgagagagcccctcctcgcccctcaatgctaacccttcaactaaga

SEQ ID NO: 52707 - DNA, 201 bp, Homo sapiens
cagctggcctagggtagcccgggctggtgtcagggtaaggagaggaagggagggatgagggctgattaatttttttcaccccacaggaggaaaagctttcrgactgctgaaggcccagcaggaagagaggctggatgagatcaacaaggtagaaggaagaactaagggggcagagccagggggatggggcgtggatgggga

SEQ ID NO: 52708 - DNA, 201 bp, Homo sapiens
atccgcccaccttggcctcccaaagtgctgggattacaggcgtgagccactgcacctggccctgttgcaatgtttttccagggagggaaagagttatctgyatttcagcctgttctgttttgggagtactggggctgaggagaaagggcagggccatcaaagggctcacattgttattgtagtccgtggtggcagcagcac

SEQ ID NO: 52709 - DNA, 201 bp, Homo sapiens; identical to SEQ ID NO: 9703

SEQ ID NO: 52710 - DNA, 201 bp, Homo sapiens
cctgagtctccaccagttggagaagtcagggaggcatctcaggtgtgaataaccttcccattctgtcccctcagttccgatgcctcaaccgctcagccgcyggaatcgcagccactgccggcttcacagacgcctgcctccaaccagccgaaacgacccccagcagcccccgaggtacctggagaactggaggggtgggga

SEQ ID NO: 52711 - DNA, 201 bp, Homo sapiens
tcaggggcacaaggggtacgatacgaggacagtgcttacagcaaagattatcaccttctctgtaagggaggacaaaatcacttacaggtttagagagaaaytgttttgttgcaatgtgtgtttttttgttttgttttgttttttgagacagtctcgctctgtcacccaggctagagtgcagtagtgcaatctcggctcact

SEQ ID NO: 52712 - DNA, 201 bp, Homo sapiens
gtgcatgaactcagggggcagggagggcagctggatgagggtggagcctggggggcgggtctgatgtaaccttgaacctggaccccttcaacccacccacwcagcccttccctttctctacccagagctcagcctgccctgatgccctcactcttacccagggtttggccatgaccagggggtcccagggggccagtggga

SEQ ID NO: 52713 - DNA, 201 bp, Homo sapiens
cagaccggcgccctgctggatagagagcaagggagaacttcagacctgcccttccatgcaccaccacaggagtctctccctagactgttacgcactagaamtccccgacccttgctcaccagtgtcccagagactgggggccctccaggatgggaaggccgagcctgtggaggagtgggccgggcaatcaccacccgggtt

SEQ ID NO: 52714 - DNA, 201 bp, Homo sapiens
gaaacggaatagggatgtggactttccaagtgcttccttactttggaaccagggtctggatcctaggcttgccttagacgcccttcttcccttaggtcctyctctggcctcaattcccgtctcaaggccacgccttccacctacagtggagtcttccgcacccagcgcgtcgacctttaccagcaggtgaaggagaaaccc

SEQ ID NO: 52715 - DNA, 201 bp, Homo sapiens
tggggaagaatgaaaactcacccacaaggactggctgcataagaagctgccccacaaggccgctcaccatctgggccaacgaggcattggtacccagaccrgcgccctgctggatagagagcaagggagaacttcagacctgcccttccatgcaccaccacaggagtctctccctagactgttacgcactagaactccccg

SEQ ID NO: 52716 - DNA, 201 bp, Homo sapiens
cactgcactccagtctgggtgacagagcaagactctgtaacttaaaaaaaaaagaaaaaagctggccgggcacgatggctcaagcctgtaatcccagcacyttgggaggccaaggtgggtggatcacaaggtcaagagttcgagaccatcctggccaacatggtgaaacccccttctctactaaaaacataaaaaattagc

SEQ ID NO: 52717 - DNA, 201 bp, Homo sapiens
caaggccacgccttccacctacagtggagtcttccgcacccagcgcgtcgacctttaccagcaggtgaaggagaaacccttgtggccccaactctaaattygagttgccacctgatttcctgtccttccgtctcatcgctgacctctcactgtgactcactctttaacacatgcctgtcccctaggcctccccaccagatg

SEQ ID NO: 52718 - DNA, 201 bp, Homo sapiens; identical to SEQ ID NO: 9407

SEQ ID NO: 52719 - DNA, 201 bp, Homo sapiens; identical to SEQ ID NO: 2009

SEQ ID NO: 52720 - DNA, 201 bp, Homo sapiens; identical to SEQ ID NO: 2010

SEQ ID NO: 52721 - DNA, 201 bp, Homo sapiens; identical to SEQ ID NO: 2011

SEQ ID NO: 52722 - DNA, 201 bp, Homo sapiens
tgatgggttgctgtactcaaagaacattctgtaccttcccatttgggctcagagaaaaatgcttccttttgttatgcacatgtacgtgttattgctattaygttgtctaatagcaccttgcctattttcttgggctttctttttaggaaacaagagctacagtggatctattcaaagcttaacttctgtaggttccaagga

SEQ ID NO: 52723 - DNA, 201 bp, Homo sapiens
ttttgatctccccaagtgatgggttgctgtactcaaagaacattctgtaccttcccatttgggctcagagaaaaatgcttccttttgttatgcacatgtaygtgttattgctattatgttgtctaatagcaccttgcctattttcttgggctttctttttaggaaacaagagctacagtggatctattcaaagcttaactt

SEQ ID NO: 52724 - DNA, 201 bp, Homo sapiens; identical to SEQ ID NO: 18501

SEQ ID NO: 52725 - DNA, 201 bp, Homo sapiens
agctttaagaaaacaagctatggatgaagtaaatcagaaagctatcatataataaaaatacactcagatgttcaacagtcaaatcatacttctttttcttyttcttcttttttttttttttttttttttttttttttgagaaagagcctcgctctgtcaccaggctggagtgcagtggtgcgatcttggctcactgcagcc

SEQ ID NO: 52726 - DNA, 201 bp, Homo sapiens
aagaaaacaagctatggatgaagtaaatcagaaagctatcatataataaaaatacactcagatgttcaacagtcaaatcatacttctttttcttcttcttyttttttttttttttttttttttttttttttgagaaagagcctcgctctgtcaccaggctggagtgcagtggtgcgatcttggctcactgcagcctctgcc

SEQ ID NO: 52727 - DNA, 201 bp, Homo sapiens
aaacaagctatggatgaagtaaatcagaaagctatcatataataaaaatacactcagatgttcaacagtcaaatcatacttctttttcttcttcttctttyttttttttttttttttttttttttttgagaaagagcctcgctctgtcaccaggctggagtgcagtggtgcgatcttggctcactgcagcctctgcctccc

SEQ ID NO: 52728 - DNA, 201 bp, Homo sapiens
agctatcatataataaaaatacactcagatgttcaacagtcaaatcatacttctttttcttcttcttcttttttttttttttttttttttttttttttgaraaagagcctcgctctgtcaccaggctggagtgcagtggtgcgatcttggctcactgcagcctctgcctcccaggttcaagtgattctcctgcctcagcct

SEQ ID NO: 52729 - DNA, 201 bp, Homo sapiens; identical to SEQ ID NO: 2013

SEQ ID NO: 52730 - DNA, 201 bp, Homo sapiens
acagttacctgatattcttttgtactcttaaataaaactgaatgactcatagaagttgagggaatttccctgaccttctacaatgcctgtctcatttttgkttttttcctaaggagctcaaggttacccttgaattagaccttgaaagagatagaaccagtagaggcagtaggaagactagccatattttggaaagagacc

SEQ ID NO: 52731 - DNA, 201 bp, Homo sapiens; identical to SEQ ID NO: 18503

SEQ ID NO: 52732 - DNA, 201 bp, Homo sapiens; identical to SEQ ID NO: 18505

SEQ ID NO: 52733 - DNA, 201 bp, Homo sapiens; identical to SEQ ID NO: 18506

SEQ ID NO: 52734 - DNA, 201 bp, Homo sapiens; identical to SEQ ID NO: 18508

SEQ ID NO: 52735 - DNA, 201 bp, Homo sapiens
ctcattcttacatggaaaactctcagagtagataaatcattgaagatgtatttggtcattaacatggattaattttaagagtaatataaatgtatgtatcrgtatacaaatagctataccttgagcttcagtttactaaaaatcatgctttaggcatacttcttttttagatttttttctaatacagcctcactatacttc

SEQ ID NO: 52736 - DNA, 201 bp, Homo sapiens; identical to SEQ ID NO: 2019

SEQ ID NO: 52737 - DNA, 201 bp, Homo sapiens; identical to SEQ ID NO: 2021

SEQ ID NO: 52738 - DNA, 201 bp, Homo sapiens; identical to SEQ ID NO: 2023

SEQ ID NO: 52739 - DNA, 201 bp, Homo sapiens; identical to SEQ ID NO: 18520

SEQ ID NO: 52740 - DNA, 201 bp, Homo sapiens; identical to SEQ ID NO: 18523

SEQ ID NO: 52741 - DNA, 201 bp, Homo sapiens
agtgttgcctgatcggtacagcatccctgtcatgtgtctcattcttacatggaaaactctcagagtagataaatcattgaagatgtatttggtcattaacrtggattaattttaagagtaatataaatgtatgtatcggtatacaaatagctataccttgagcttcagtttactaaaaatcatgctttaggcatacttctt

SEQ ID NO: 52742 - DNA, 201 bp, Homo sapiens; identical to SEQ ID NO: 18524

SEQ ID NO: 52743 - DNA, 201 bp, Homo sapiens; identical to SEQ ID NO: 18525

SEQ ID NO: 52744 - DNA, 201 bp, Homo sapiens; identical to SEQ ID NO: 18527

SEQ ID NO: 52745 - DNA, 201 bp, Homo sapiens
aaaaatagaacatggagcgtagaatcagacccgagtttgaatcctgactctagagcttaaaactgagagcagtggaggttttcagcaacccagggaatcaycttaagactgcagagccttttctttacctcataatgttttgagaatcgcgggaaaggatatgtgaaaggctttataatacaagtttcaatacataataag

SEQ ID NO: 52746 - DNA, 201 bp, Homo sapiens; identical to SEQ ID NO: 18528

SEQ ID NO: 52747 - DNA, 201 bp, Homo sapiens
ttcagcaacccagggaatcatcttaagactgcagagccttttctttacctcataatgttttgagaatcgcgggaaaggatatgtgaaaggctttataatamaagtttcaatacataataaggatttattcttactgcatttgctcctatcatctgaaagaaaacacgtagtaaaggagtaatgctatttttaggaaaagtg

SEQ ID NO: 52748 - DNA, 201 bp, Homo sapiens
ttcaagctgtggaaacaagaggtcagtgttgcctgatcggtacagcatccctgtcatgtgtctcattcttacatggaaaactctcagagtagataaatcaktgaagatgtatttggtcattaacatggattaattttaagagtaatataaatgtatgtatcggtatacaaatagctataccttgagcttcagtttactaaa

SEQ ID NO: 52749 - DNA, 201 bp, Homo sapiens
caacttttcactgaggcacaggggaacatgaatgaactttaggtcagacagaccctagttcaaatttttaggtcaccactttctagttcgtgtaacctcakagttaccaatgttggggaatctgttttctttatccatacaatgaagatcataattctcagcttgccacattgttgggaatgtacacaatactgtgtttga

SEQ ID NO: 52750 - DNA, 201 bp, Homo sapiens; identical to SEQ ID NO: 18530

SEQ ID NO: 52751 - DNA, 201 bp, Homo sapiens
aaaactcaggtaatcataatcaaagaggtaatccccgtagagctttaagaaaacaagctatggatgaagtaaatcagaaagctatcatataataaaaatayactcagatgttcaacagtcaaatcatacttctttttcttcttcttcttttttttttttttttttttttttttttttgagaaagagcctcgctctgtcacc

SEQ ID NO: 52752 - DNA, 201 bp, Homo sapiens; identical to SEQ ID NO: 18532

SEQ ID NO: 52753 - DNA, 201 bp, Homo sapiens
gaaatgttaagccaatgtattagggaagatgagagaatataaactccattcttggtggaggaaagagaagagtttctcttttgtgattgtacccataaagwagaaattcaaatgattaaagtgtgtgttctatattaggtgtaaaatgatctttgagataatcaaatggcttggctctgggagaagagtttgtcaattaaa

SEQ ID NO: 52754 - DNA, 201 bp, Homo sapiens; identical to SEQ ID NO: 18541

SEQ ID NO: 52755 - DNA, 201 bp, Homo sapiens
gtctttgtaattattgtagattttgatctccccaagtgatgggttgctgtactcaaagaacattctgtaccttcccatttgggctcagagaaaaatgcttmcttttgttatgcacatgtacgtgttattgctattatgttgtctaatagcaccttgcctattttcttgggctttctttttaggaaacaagagctacagtgg

SEQ ID NO: 52756 - DNA, 201 bp, Homo sapiens
ggtgaaggtgaaggtacctagcaaggaggcttactaaatgaaaaagaacaaatggccaagcattggtctttggggaatggttttatttaacgttcagacaragaagaatggacaggatgagaaggcatgaccaacagtggtagaagctgcaaaaaatggtttaggagatcaggagaggacactggttttaactcctaagac

SEQ ID NO: 52757 - DNA, 201 bp, Homo sapiens; identical to SEQ ID NO: 18542

SEQ ID NO: 52758 - DNA, 201 bp, Homo sapiens; identical to SEQ ID NO: 2018

SEQ ID NO: 52759 - DNA, 201 bp, Homo sapiens; identical to SEQ ID NO: 2020

SEQ ID NO: 52760 - DNA, 201 bp, Homo sapiens; identical to SEQ ID NO: 2022

SEQ ID NO: 52761 - DNA, 201 bp, Homo sapiens; identical to SEQ ID NO: 2024

SEQ ID NO: 52762 - DNA, 201 bp, Homo sapiens
aaaggagtaatgctatttttaggaaaagtggatgagatcattgtaatatactttctgtgaaggatcttagcaggttgatacaatagctgtgagggtgaagytccctcctctacttctaccccaaaataaaaagtcagcctctaaccaaaatatttggaagactcagaaaaaacctctctactgttgagtcataaaggccca

SEQ ID NO: 52763 - DNA, 201 bp, Homo sapiens
cttttactgatttgtcactgccacagttttggtacctttcttcgttttaatcatgacctctgtcttgaagtccactccagttaaactttaaactcacttcyaggaaaatttggctaaagcaaaattcatattgggttttggagttccataaacttatatttaaattttaagtgctgccacttcaacattctgagaagtagt

SEQ ID NO: 52764 - DNA, 201 bp, Homo sapiens
gcatttcattgttaagatgtatgaggtgtgactacaaccagattatttttcacaatccaagaaataaattagttgctttagtttatttgcacacattgtartgtcacaggaaatgtgtgctgataaaagtgtcagataaagttgaatgacctcggttttcaatccagcatttatgactaaccacatgatctcatataaatc

SEQ ID NO: 52765 - DNA, 201 bp, Homo sapiens
tttttaaaagttatataactttttctggaggaatcatcatgaatatccatggaaaaatatggttatccttaaggatctcagagatgttgtagagttaattrcccaaagcgactctgtttttagagtacataatttcattaggggttctcagattttacattccattccattattaaaaggatatgagttgttacatcttgc

SEQ ID NO: 52766 - DNA, 201 bp, Homo sapiens
aatcctttatacatctttgatgacagtcattttgggaccacttttcaaaagcatgttcttgatttttaaaagttatataactttttctggaggaatcatcrtgaatatccatggaaaaatatggttatccttaaggatctcagagatgttgtagagttaattgcccaaagcgactctgtttttagagtacataatttcatt

SEQ ID NO: 52767 - DNA, 201 bp, Homo sapiens
cttcaagcactttcctttgaagcagagctatgacttaatttgaggaaatgaaaactgatgtataatacagtagttataagctttggaactaaaagtgttcycattaaaagctaaacatccatctctccgctgaagagactgccacgcattgactataagccaggtccctgctctcctcactgttttaaagcagcttctttc

SEQ ID NO: 52768 - DNA, 201 bp, Homo sapiens
tttgctgaaatcttcacagtagaagggctctaaacaaacacatttcctagaagataaaaattgctataatcctttatacatctttgatgacagtcattttrggaccacttttcaaaagcatgttcttgatttttaaaagttatataactttttctggaggaatcatcatgaatatccatggaaaaatatggttatccttaa

SEQ ID NO: 52769 - DNA, 201 bp, Homo sapiens
tgaatgacaaataccagtttcttttaagagcaactaagcaggactctaaatacgtacagacgattatgtccctgcacatgctcatgtgctgtattcctcartctggagatgagtcaaatatttttggcagacagcaggtgcttccatcaatcccctctccctcatattttatttgcaatgatcacatttatgtcatttgtt

SEQ ID NO: 52770 - DNA, 201 bp, Homo sapiens
tgtattagggaagatgagagaatataaactccattcttggtggaggaaagagaagagtttctcttttgtgattgtacccataaagtagaaattcaaatgaktaaagtgtgtgttctatattaggtgtaaaatgatctttgagataatcaaatggcttggctctgggagaagagtttgtcaattaaagaaataagatagatt

SEQ ID NO: 52771 - DNA, 201 bp, Homo sapiens
gttaaaacaattaaaattcccttctaattttggcaatggttctcaaccattttttgtcttgtttaactggcaatcatgaatttcactttgagcagaactgmatgtgattgacttcatgaaacttgcattttaaatcatttttcagagtggcagcaaaagctcaactgtttgaaaatgttggttcacctaaaccagtttctt

SEQ ID NO: 52772 - DNA, 201 bp, Homo sapiens
gtattagggaagatgagagaatataaactccattcttggtggaggaaagagaagagtttctcttttgtgattgtacccataaagtagaaattcaaatgatkaaagtgtgtgttctatattaggtgtaaaatgatctttgagataatcaaatggcttggctctgggagaagagtttgtcaattaaagaaataagatagattt

SEQ ID NO: 52773 - DNA, 201 bp, Homo sapiens
gagaatttcctaatgctctctgagccattactggatgtctttacatgagttatctcttttaaggtctgcagtgtcctttggaaatgggtagtataaaccamattttagagatgacgagaactgatgcttttctaccgtttccaacctagggttctctgactacaattctgtgctccttctgttttaccttctccattttta

SEQ ID NO: 52774 - DNA, 201 bp, Homo sapiens
aaaattgctataatcctttatacatctttgatgacagtcattttgggaccacttttcaaaagcatgttcttgatttttaaaagttatataactttttctgkaggaatcatcatgaatatccatggaaaaatatggttatccttaaggatctcagagatgttgtagagttaattgcccaaagcgactctgtttttagagtac

SEQ ID NO: 52775 - DNA, 201 bp, Homo sapiens
gcagggataaagttaatggtggagaaactaatgatgcttatctacttttttcctgtgcttggattttacaacctaggcactgtgacatttttcctgaatcwttccatgtctgtgaagtgatgtctttgtaattattgtagattttgatctccccaagtgatgggttgctgtactcaaagaacattctgtaccttcccattt

SEQ ID NO: 52776 - DNA, 201 bp, Homo sapiens; identical to SEQ ID NO: 9408

SEQ ID NO: 52777 - DNA, 201 bp, Homo sapiens; identical to SEQ ID NO: 9409

SEQ ID NO: 52778 - DNA, 201 bp, Homo sapiens
ctgactgaagctgtcattttcttccttcctttcacattatgttcttaaagcattatctcttgggtatcagtgtctgaaagagaaaagataaaaagaaacarcacacattatcatcaacttacaattctgagccaagccctaaggtgatgtgggtggcaccttgacaccatggcacacattaaactgtggctgttctcattt

SEQ ID NO: 52779 - DNA, 201 bp, Homo sapiens
agctttctcttcctgttttgtgacaggagttgcatggatagtctaaaatcctggatttcccataaaatcttacttttggttgtagaatgcagtttgtgacrcatggtcagtccgacataaacataatcttgtgttatactaataacctgacttggagtaagatagaaaagtgagtggttaaactaaaagataagtcaaaca

SEQ ID NO: 52780 - DNA, 201 bp, Homo sapiens; identical to SEQ ID NO: 9411

SEQ ID NO: 52781 - DNA, 201 bp, Homo sapiens; identical to SEQ ID NO: 18510

SEQ ID NO: 52782 - DNA, 201 bp, Homo sapiens; identical to SEQ ID NO: 18511

SEQ ID NO: 52783 - DNA, 201 bp, Homo sapiens; identical to SEQ ID NO: 9414

SEQ ID NO: 52784 - DNA, 201 bp, Homo sapiens; identical to SEQ ID NO: 18514

SEQ ID NO: 52785 - DNA, 201 bp, Homo sapiens; identical to SEQ ID NO: 9415

SEQ ID NO: 52786 - DNA, 201 bp, Homo sapiens; identical to SEQ ID NO: 18516

SEQ ID NO: 52787 - DNA, 201 bp, Homo sapiens; identical to SEQ ID NO: 18519

SEQ ID NO: 52788 - DNA, 201 bp, Homo sapiens; identical to SEQ ID NO: 18521

SEQ ID NO: 52789 - DNA, 201 bp, Homo sapiens
gactgtctcaaatcttggtgtcatatttggcccaactctaatgagagcacaggaagaaactgtggctgctatgatgaatattaaatttcagaatattgtgrtagaaattctgatagagcactatgaaaaggtaggcggaattttcatgtggaagtgtcaagttttatatcttggttttataaaggaattttgcatttgatc

SEQ ID NO: 52790 - DNA, 201 bp, Homo sapiens; identical to SEQ ID NO: 18522

SEQ ID NO: 52791 - DNA, 201 bp, Homo sapiens
aagtttatattctatttgagactaccatagtctgattcttagaagtcttcagaacctgataatgttctcacttccaacctctatgcaaccaacatacccaygtgcatgtgttcatgtgcacacacacagttctttaaagtcctgtccttctctgagtgcctctacttcctcagttcttccttagaccatgtttcactggga

SEQ ID NO: 52792 - DNA, 201 bp, Homo sapiens
ttggtcattaacatggattaattttaagagtaatataaatgtatgtatcggtatacaaatagctataccttgagcttcagtttactaaaaatcatgctttrggcatacttcttttttagatttttttctaatacagcctcactatacttcttattgagaagccctgcattatttattactgcaagcacctctttgattttt

SEQ ID NO: 52793 - DNA, 201 bp, Homo sapiens
ctcattattcacattctctatttgatgaaacattgccaccacacctctgtactttcctttatctttagacatggttttcttgaggactttggatatatttrtgacttctttgaagtctttttctgtttaaatctgatgtttgggtctgctcacaggcagtttttattatctactttttgcctggtgtatgagtcacacttt

SEQ ID NO: 52794 - DNA, 201 bp, Homo sapiens
tgaaaatgcctttatttcaccttcctttttgcaggttagttttgctggatagaagattcttagttggcagactttttttttctttaagcattttgaatatkccatccctctgccttctagcctttattgtttctattgagaaataagcttattggggttccttgtagaccccagtaagactttttctcttgatgctttcag

SEQ ID NO: 52795 - DNA, 201 bp, Homo sapiens
tatcaagagaacagcatagggtaaccgcccaatgattccattacctcacctcccactgggtccctcccacaacacttggggattatgggaactacaattcragatgagatttgggtggggacacagccaaaccatatcaatgggctaatacgtactctaatgactggcacattaggcagtctatagcaattgctgtgatca

SEQ ID NO: 52796 - DNA, 201 bp, Homo sapiens
ctggttattacttatttttctcaaaatgaatacttaagagagaaattctgttttatgtcacaactatcttcattcttttttgttgaaaggaagttctattraaatttttttaaatggttgtctttttctcttaatatatctttttattgaaaagtagaacaatgtgacctctagtaccaaacattttaaatgtcaggaact

SEQ ID NO: 52797 - DNA, 201 bp, Homo sapiens
gagttacaagaatgtgtttaatctactgtctttaaatggaagttagttttaaatttgtattggtttgaattctcctcatttattatttgagaatattttaraaatcatgtcactaccacatgtgatgaaaatttgtatcatagttcaaaaaattttcagtttctcctctgggtgttagttggtattttttaaataaatgct

SEQ ID NO: 52798 - DNA, 201 bp, Homo sapiens
ggatctattttgagttacaagaatgtgtttaatctactgtctttaaatggaagttagttttaaatttgtattggtttgaattctcctcatttattatttgrgaatattttaaaaatcatgtcactaccacatgtgatgaaaatttgtatcatagttcaaaaaattttcagtttctcctctgggtgttagttggtatttttt

SEQ ID NO: 52799 - DNA, 201 bp, Homo sapiens
gatttttatcataattttttgatatatatttttttgtctggggatctattttgagttacaagaatgtgtttaatctactgtctttaaatggaagttagttwtaaatttgtattggtttgaattctcctcatttattatttgagaatattttaaaaatcatgtcactaccacatgtgatgaaaatttgtatcatagttcaaa

SEQ ID NO: 52800 - DNA, 201 bp, Homo sapiens
cattttaaagtgtagttttgaaaattaggtcattgtaaagaatattgtaatcacttctacaacttcggagattgtttccttatcgatctctttataatttrtcttaatggttcaaagaaatatgacttattgtttactggaggaagctgttgctattagaaaatgtgattttttggaaaaatatttccttttttttaggaa

SEQ ID NO: 52801 - DNA, 201 bp, Homo sapiens
tattctttaagttttttttatagagactttaactgtttttggttatggttttaaataataatttttatcctttatgattttttctctgtttattggatccrtggggctccttatgttctaccatttccataagtagaactcttaagtatataatgttggtttctttatttgtaaactcctagatttgaaacaatacaagtt

SEQ ID NO: 52802 - DNA, 201 bp, Homo sapiens
aaaaaaaaaaagcaaaagaaagaaaaaaaaatctccaattagtgccaaaggaacaaatgcagtgcttattggtaaactgtcatgggcaatttagggttctkgccaagaacaaatttgtaaactttttgtcttacgcattaacattgtttcattacatgagttcttcaatagcattatctatagttgctgcctaatacttca

SEQ ID NO: 52803 - DNA, 201 bp, Homo sapiens
gatcacctgagctccggaagtcgagactgcagtgagccatgattgcactattgcattccagcctgagcaacccagtgagaccctgtctaaaaaaaaaaaargcaaaagaaagaaaaaaaaatctccaattagtgccaaaggaacaaatgcagtgcttattggtaaactgtcatgggcaatttagggttcttgccaagaaca

SEQ ID NO: 52804 - DNA, 201 bp, Homo sapiens
cctgtgtctgcaaaaaatataaaacattaattggcacggtggtgtgcacctaatagtcccagctacctgggaagctaagatgggaagatcacctgagctcyggaagtcgagactgcagtgagccatgattgcactattgcattccagcctgagcaacccagtgagaccctgtctaaaaaaaaaaaaagcaaaagaaagaaa

SEQ ID NO: 52805 - DNA, 201 bp, Homo sapiens
caacacctttataaacttaaaagatctttaaggatccccaaagggcttctgtttttatggattatatttattgatatttactgtattggaaattcaaacakaacattttaaaatatgtatttattgaaaataagaataagcctattacatattagcacaaataacataatgttaatgaaaaatgatattttcctaaagagt

SEQ ID NO: 52806 - DNA, 201 bp, Homo sapiens
aatttaatgattttcctttagaaaatgtgaaaattaatgaagaagtaagttaaaaccacttataatttcatcacctgaagaaaactgttaaaatttggtgyacagccttctaatctcatccgtggcagtggtttctcaaacttcttgatctcacaacacctttataaacttaaaagatctttaaggatccccaaagggctt

SEQ ID NO: 52807 - DNA, 201 bp, Homo sapiens
gggtttgaggaggctgtgagggccaatgagaggcagttagaaaggtgcagctggaaccaggagacagcatggagtttgatgccatttaagaaacttctacrtagcaattactctgtataggtgaaggtgaaggtacctagcaaggaggcttactaaatgaaaaagaacaaatggccaagcattggtctttggggaatggtt

SEQ ID NO: 52808 - DNA, 201 bp, Homo sapiens
aagaaatattttgaactgcacaatttaaacaccttgttttattctttccagctcctaaatcccctcctgatattgatattgatattgaactgtgggacaayaagacgataacaagtgggctgaaaaactacctcaggtgaggagggtttaactcctggtactctggatgtaatctctgactcaccccttgagtagtaacca

SEQ ID NO: 52809 - DNA, 201 bp, Homo sapiens
ctataaggagatttttatgaataggatcaggattgggcagctgttttgatattgggaatcagagacaggaaaagaagtttccaagtctctgagacagtgtyggaaagaatggtggtttagcttctgatcttagcttgtgcatatgtaggaggaagggaaaattttggccatagggtttgaggaggctgtgagggccaatga

SEQ ID NO: 52810 - DNA, 201 bp, Homo sapiens
aaatagctgagccaagagcatgtgaaccttacctctgtcagcagtgtctttatcttccttttgaccgaagcatggtgaaaactaagccccatgcatgtcayagcaaacatcatttctctgagattgtcttgatttttaggctttagtgtaagggatttaaccttgctacttcttctgccatgctacgtagttgaattgctc

SEQ ID NO: 52811 - DNA, 201 bp, Homo sapiens
tttcattaggggttctcagattttacattccattccattattaaaaggatatgagttgttacatcttgcttctactaatgtgcttgcttctaaagttcctrctttactcttcttgctttcaaatttattcttgatctacagtgggcttcggtttttaatttgaataatggaatttcataaagtcagaggcttttcattatt

SEQ ID NO: 52812 - DNA, 201 bp, Homo sapiens
agtcatacataccctcaaatttttacattttgagaaaataggccttattgtcctgtcgattacttttgtcacctaacaacacataataaatacctcttcayagtagtacctctagttccattgttaggcacagatttttcacgcctttctgtcaatcaattcagttccattggcttgctgtgcctagaatttttttcagtt

SEQ ID NO: 52813 - DNA, 201 bp, Homo sapiens
aaatgtgtgctgataaaagtgtcagataaagttgaatgacctcggttttcaatccagcatttatgactaaccacatgatctcatataaatctacactattyagttttctcttgaagctctccactctacctcctcttcatagaaatctttgtaagacatacaggaccagaaaaaatatataatctgacctctcattctatg

SEQ ID NO: 52814 - DNA, 201 bp, Homo sapiens
gagattaagactagacactgcctcaagcaatggctatcagcggcctggctcagtgtaagtgagcgtttgtatatttgctgtgtctcccagggatacagagrggagttgagtgtttcagaagaactcttgggaatcccacaagttgaatacattgggaatactttatctgtagagtgggtacgtccacttctgtaagactct

SEQ ID NO: 52815 - DNA, 201 bp, Homo sapiens; identical to SEQ ID NO: 9416

SEQ ID NO: 52816 - DNA, 201 bp, Homo sapiens
cttgggtatcagtgtctgaaagagaaaagataaaaagaaacaacacacattatcatcaacttacaattctgagccaagccctaaggtgatgtgggtggcaycttgacaccatggcacacattaaactgtggctgttctcattttattttataccccccaccccaattttttgctcacagtcaatatttaatagaaaatagt

SEQ ID NO: 52817 - DNA, 201 bp, Homo sapiens
aacctgctgaaatggtgagtggtgggagtctgtatctattgagtagcccagcagaaagaaaattcaataaaaagaaaatcagtcattaaaataatccatcytctgtgcaatgtagtcattaacccacctttcaaaaccaagtttttgagattcccaagtttactcctaatgagcttaatattaactatattccactttatt

SEQ ID NO: 52818 - DNA, 201 bp, Homo sapiens
ttagtcatattgagctgagggtggaagaaagagggagccagttgtacctcaaaagccacagactctcggcttttcttactgataattagtagatttgcttraacaaatatttctttattctttaagttttttttatagagactttaactgtttttggttatggttttaaataataatttttatcctttatgattttttctc

SEQ ID NO: 52819 - DNA, 201 bp, Homo sapiens
cattcgctgggaattcagcctctgcaacccagagatagagggcctgagatatgctcacagcctgccaaccccatgagatactgcatcacttgacttggggytgagaagagagggagccctgtcttcttggccacatttgcccagagtgaagttttagtcatattgagctgagggtggaagaaagagggagccagttgtacc

SEQ ID NO: 52820 - DNA, 201 bp, Homo sapiens
gttgggctggtcttgaactcctgatcctcaggtgatccacccgccttggcctccaaaagtggtgggattacaggtttgggtcaccgtgcccagactaattyagtatctttagtgaactattttaatgaagtctatttccccctctgtgtgaagcctcttctattatctcttcagagaatgcagcctgggacatgaccacag

SEQ ID NO: 52821 - DNA, 201 bp, Homo sapiens
gttttgctggatagaagattcttagttggcagactttttttttctttaagcattttgaatatgccatccctctgccttctagcctttattgtttctattgmgaaataagcttattggggttccttgtagaccccagtaagactttttctcttgatgctttcagaattttctttttgtctttggcttcagcacttttactgt

SEQ ID NO: 52822 - DNA, 201 bp, Homo sapiens
tgctagcaataagttctctcaatttttgttttcctgaaaatgcctttatttcaccttcctttttgcaggttagttttgctggatagaagattcttagttgrcagactttttttttctttaagcattttgaatatgccatccctctgccttctagcctttattgtttctattgagaaataagcttattggggttccttgtag

SEQ ID NO: 52823 - DNA, 201 bp, Homo sapiens
atttgagccatatacatttgaaatataacttactttgctcatccttccccagcattcctggcttctttctgaacttacaaaaggtcaagccctgctcaccraatgtgcattcagatcaccacaaatttacttataaaaacagcaaacagctaataacactcttgatccctggcaacctttcatggctgaaaaaaaattagg

SEQ ID NO: 52824 - DNA, 201 bp, Homo sapiens
tcgtggctccacaggagtcaatagccgtgctgctgggagcagagtagagagaaaatgttccttttactgctcccatggttttctgagataaaaaggatgargatagtaagatccccagaggaagtagctattggttaattacagcctggtactctgtaagctggaggttagatctaaaaatctcattgacattaaaggtta

SEQ ID NO: 52825 - DNA, 201 bp, Homo sapiens
atgattgcactattgcattccagcctgagcaacccagtgagaccctgtctaaaaaaaaaaaaagcaaaagaaagaaaaaaaaatctccaattagtgccaarggaacaaatgcagtgcttattggtaaactgtcatgggcaatttagggttcttgccaagaacaaatttgtaaactttttgtcttacgcattaacattgttt

SEQ ID NO: 52826 - DNA, 201 bp, Homo sapiens
attacaaaaaatatatattgtgggtggacttatgtattcattaggagatataacattttagaaaattattatggaatttcttttgaatataaaggaaaaartgaaagttgatttctcctaaacgaaaaccttttgattttacacatggatatttgctagtggtattaaatttgccaatcgatgtttttaattcaataatat

SEQ ID NO: 52827 - DNA, 201 bp, Homo sapiens
ctgacctcaggtgatccacccgcctcagcctcccaaagtgctgggattacaggcatgagccactgcacccagccaactcatacttctttaatatgtttttrcattctgaatactctaaatcaacttttagtggggatcagcataaacttagagctcactcagctctaccttcagagttacagtctgtcagttcacaacact

SEQ ID NO: 52828 - DNA, 201 bp, Homo sapiens
ttcagaacagcccttctgtattgtctttatatttgtaagataaggagaggaatctggggcttcatctggtcacactgggttgaatctctaggagctctctrtgggtgtattgccacactgctatgaagaaatatccaagactcagtaatttataagaaaaagaggtttaattgactcacagttccgcagggctgggaagga

SEQ ID NO: 52829 - DNA, 201 bp, Homo sapiens
gccccactactggaactttatcatactgccaaatcacccaattcttttatttacttatttatgtgttattttatttttaattgatgaataacagtcacctrattcttaaagaaacacttaacgtttaggggagaataaaagattctactattctaacatgtgtttcctttctctgttgtaggtgccttgcagaaccactga

SEQ ID NO: 52830 - DNA, 201 bp, Homo sapiens
tcttcgttttaatcatgacctctgtcttgaagtccactccagttaaactttaaactcacttctaggaaaatttggctaaagcaaaattcatattgggtttkggagttccataaacttatatttaaattttaagtgctgccacttcaacattctgagaagtagtttccttgaattctctgaatctgtttcctcatctctaaa

SEQ ID NO: 52831 - DNA, 201 bp, Homo sapiens
cgatttctctcttattttcagtgtatttgaatgaagcagggttcaactttgtgagaaaatgcattcaagctgtggaaacaagaggtcagtgttgcctgatyggtacagcatccctgtcatgtgtctcattcttacatggaaaactctcagagtagataaatcattgaagatgtatttggtcattaacatggattaatttta

SEQ ID NO: 52832 - DNA, 201 bp, Homo sapiens
cattcatttttgtgtgttgagttcactgaaagtattcactgagttctgttcttttgacctaggacactggggacaaagaaataaatgagccacttcccatkgatggcaatacttattttagttttgacatttttatttctagagttttgaagttctttttagagtactaaacacatacacacacacatatatatacacaca

SEQ ID NO: 52833 - DNA, 201 bp, Homo sapiens
tatgtcacaactatcttcattcttttttgttgaaaggaagttctattgaaatttttttaaatggttgtctttttctcttaatatatctttttattgaaaartagaacaatgtgacctctagtaccaaacattttaaatgtcaggaacttgcagttttagttgatataaaaatgctagtgtcttgcttttacctagggttac

SEQ ID NO: 52834 - DNA, 201 bp, Homo sapiens
tctgttttatgtcacaactatcttcattcttttttgttgaaaggaagttctattgaaatttttttaaatggttgtctttttctcttaatatatctttttaktgaaaagtagaacaatgtgacctctagtaccaaacattttaaatgtcaggaacttgcagttttagttgatataaaaatgctagtgtcttgcttttaccta

SEQ ID NO: 52835 - DNA, 201 bp, Homo sapiens
atcccagtatactttgaggtacagcctggttattacttatttttctcaaaatgaatacttaagagagaaattctgttttatgtcacaactatcttcattcytttttgttgaaaggaagttctattgaaatttttttaaatggttgtctttttctcttaatatatctttttattgaaaagtagaacaatgtgacctctagta

SEQ ID NO: 52836 - DNA, 201 bp, Homo sapiens
tattgctgccaaatatcccagtatactttgaggtacagcctggttattacttatttttctcaaaatgaatacttaagagagaaattctgttttatgtcacwactatcttcattcttttttgttgaaaggaagttctattgaaatttttttaaatggttgtctttttctcttaatatatctttttattgaaaagtagaacaa

SEQ ID NO: 52837 - DNA, 201 bp, Homo sapiens
acatctctgaattgattgataatgttgtatttactcacatgacgggagctaagtacaggatccatggaatatgtcagaacggcagcatccgtagagtaacsctgcagttagactgactctcagtaagatgtcattctacatgatgagcttgtgatatcagtttattagaaaagactggaatattgctgccaaatatcccag

SEQ ID NO: 52838 - DNA, 201 bp, Homo sapiens
ttcagtgtctgctctgagaaatagaagtctgatgggtatttccaggatagctttgctaaagttagactgtgaaattggataagtagctttcaaattttgtyaggcatatgtctgagtttttaacattctgtacttgccaagctgtatctcaagccgttttcttgtgattttccttcctattaggtatcaccattttaggac

SEQ ID NO: 52839 - DNA, 201 bp, Homo sapiens
taaatacctcttcacagtagtacctctagttccattgttaggcacagatttttcacgcctttctgtcaatcaattcagttccattggcttgctgtgcctasaatttttttcagtttttagtttgttgctgttaccctttcttgatttttatcataattttttgatatatatttttttgtctggggatctattttgagttac

SEQ ID NO: 52840 - DNA, 201 bp, Homo sapiens
cacttcagccctgattttacattatctgccttttcacatatgcggaaagatcagatttttgatgtctccattccaattgctaggttagacctcatgtttascctgagccaggctctttcctcactccatgtctaaataactgcgcccagatgaaatggtagtcccataatgtgaatcctatgagtcaaggtactttctgga

SEQ ID NO: 52841 - DNA, 201 bp, Homo sapiens
gctacagagagagagacaaacacatatttaagcccgaagtgagtttgctatggtgctggaaacaaatgtctaaatccagttttaaacttacttaagaattycctgtagcattatttagtatttaatagggatatttcccattttaatgagtaccatggtttacaataaaatgattaatccttcattgttcataattagtaa

SEQ ID NO: 52842 - DNA, 201 bp, Homo sapiens
catattattaaaattgcattttaaaatcaagaaaaggaaggagaagaaatatatatttctactcttttaattacataattacctacactgggtgttttttkgttttttttgtgtgtttgtttgtttttacatgtgcatttgaattacagtctaaggtcacttgccttcagcctgaagaacatcttttagtatttattgtga

SEQ ID NO: 52843 - DNA, 201 bp, Homo sapiens
atattattaaaattgcattttaaaatcaagaaaaggaaggagaagaaatatatatttctactcttttaattacataattacctacactgggtgtttttttkttttttttgtgtgtttgtttgtttttacatgtgcatttgaattacagtctaaggtcacttgccttcagcctgaagaacatcttttagtatttattgtgat

SEQ ID NO: 52844 - DNA, 201 bp, Homo sapiens; identical to SEQ ID NO: 2014

SEQ ID NO: 52845 - DNA, 201 bp, Homo sapiens; identical to SEQ ID NO: 2016

SEQ ID NO: 52846 - DNA, 201 bp, Homo sapiens
acttattttagttttgacatttttatttctagagttttgaagttctttttagagtactaaacacatacacacacacatatatatacacacatatatatatwtttttcaaaatgtcaaataatcccaaaatgcctagtgaattaaaaatgacaatttctaacttttgccctctttctccttaccagtagtttgcatatatat

SEQ ID NO: 52847 - DNA, 201 bp, Homo sapiens
ctctagttccattgttaggcacagatttttcacgcctttctgtcaatcaattcagttccattggcttgctgtgcctagaatttttttcagtttttagtttkttgctgttaccctttcttgatttttatcataattttttgatatatatttttttgtctggggatctattttgagttacaagaatgtgtttaatctactgtc

SEQ ID NO: 52848 - DNA, 201 bp, Homo sapiens
tattttaaaaatcatgtcactaccacatgtgatgaaaatttgtatcatagttcaaaaaattttcagtttctcctctgggtgttagttggtattttttaaayaaatgctttctctttaaataagtaatttaatttgacctcgccccaaaaccctttaaaaaaattagaattgatccaaagaaaatctagccaaaaaacaatg

SEQ ID NO: 52849 - DNA, 201 bp, Homo sapiens
ctttaggcatacttcttttttagatttttttctaatacagcctcactatacttcttattgagaagccctgcattatttattactgcaagcacctctttgatttttttttttccaagcattaaggaggtaagattcttaaggagcttgtcttcactcccttccttccttatagtctttcttttactgatttgtcactgccac

SEQ ID NO: 52850 - DNA, 201 bp, Homo sapiens
gccctgcattatttattactgcaagcacctctttgatttttttttttccaagcattaaggaggtaagattcttaaggagcttgtcttcactcccttccttmcttatagtctttcttttactgatttgtcactgccacagttttggtacctttcttcgttttaatcatgacctctgtcttgaagtccactccagttaaactt

SEQ ID NO: 52851 - DNA, 201 bp, Homo sapiens
attatttattactgcaagcacctctttgatttttttttttccaagcattaaggaggtaagattcttaaggagcttgtcttcactcccttccttccttataktctttcttttactgatttgtcactgccacagttttggtacctttcttcgttttaatcatgacctctgtcttgaagtccactccagttaaactttaaactc

SEQ ID NO: 52852 - DNA, 201 bp, Homo sapiens
aaggaggtaagattcttaaggagcttgtcttcactcccttccttccttatagtctttcttttactgatttgtcactgccacagttttggtacctttcttcrttttaatcatgacctctgtcttgaagtccactccagttaaactttaaactcacttctaggaaaatttggctaaagcaaaattcatattgggttttggagt

SEQ ID NO: 52853 - DNA, 201 bp, Homo sapiens
tccttatagtctttcttttactgatttgtcactgccacagttttggtacctttcttcgttttaatcatgacctctgtcttgaagtccactccagttaaackttaaactcacttctaggaaaatttggctaaagcaaaattcatattgggttttggagttccataaacttatatttaaattttaagtgctgccacttcaaca

SEQ ID NO: 52854 - DNA, 201 bp, Homo sapiens
ccttttactgctcccatggttttctgagataaaaaggatgaggatagtaagatccccagaggaagtagctattggttaattacagcctggtactctgtaarctggaggttagatctaaaaatctcattgacattaaaggttaaaacaattaaaattcccttctaattttggcaatggttctcaaccattttttgtcttgtt

SEQ ID NO: 52855 - DNA, 201 bp, Homo sapiens
tctaaccaaaatatttggaagactcagaaaaaacctctctactgttgagtcataaaggcccagtgaacagagccaactgaagggggaatgtgagttcagcrtaaacacctaatgcgatttctctcttattttcagtgtatttgaatgaagcagggttcaactttgtgagaaaatgcattcaagctgtggaaacaagaggtc

SEQ ID NO: 52856 - DNA, 201 bp, Homo sapiens
tcattgattccttgtaatatcatgaaggaatcttatttctcttacttctgaatcctgtttcataaacaaattttgtgggaattcaagtcaacccacttatrcttcaagaagtaaagttattatctaaaggcaggtagttcataggtacatacataaacttcctaaaatagcattgaaaaatacgtttggcaagttcaaatg

SEQ ID NO: 52857 - DNA, 201 bp, Homo sapiens
aatcccacaagttgaatacattgggaatactttatctgtagagtgggtacgtccacttctgtaagactctattcttttctatgagtgatgtggaagtcttyggatatggacagaatctctctcacagggcagcacttcaagcactttcctttgaagcagagctatgacttaatttgaggaaatgaaaactgatgtataata

SEQ ID NO: 52858 - DNA, 201 bp, Homo sapiens
atgaaactactctttcagtcaaagcaaaggatggtcaaaggaaacaaaaattcatggttatttttgccaacacagtatattcttccacatctctgaattgrttgataatgttgtatttactcacatgacgggagctaagtacaggatccatggaatatgtcagaacggcagcatccgtagagtaaccctgcagttagactg

SEQ ID NO: 52859 - DNA, 201 bp, Homo sapiens; identical to SEQ ID NO: 2012

SEQ ID NO: 52860 - DNA, 201 bp, Homo sapiens
gtttataaaataataggcacatttcccctacctcagacatacagcagtgatactagagctgagaattggccttaggttttcctggctttaaacaaagctgkgcactaactctgcaccatgaaactactctttcagtcaaagcaaaggatggtcaaaggaaacaaaaattcatggttatttttgccaacacagtatattctt

SEQ ID NO: 52861 - DNA, 201 bp, Homo sapiens
ttagaactaatgactggcttcttttataatttcttcttatgttttccttcatatagcagtgacgtgtagacaggagcaaataggaaaaaaaaacctagcawtgaattcgtcttgttccattgttaggcactcttccgtttgtcttcatcttactacaactgtttaacttaggtattgttacttccctcattttataaatga

SEQ ID NO: 52862 - DNA, 201 bp, Homo sapiens
agcaaacatttataaagtacctagacagtactgggcatgtgatagttattaagaataacaataacaataaccttcaaactctctttggttttgttcaaagyccagtaagggccctcatgtattaggtttttttaactgcagagagtagagccactttggtatcttcctagaataatggtcagtgcctagcatttaaatagc

SEQ ID NO: 52863 - DNA, 201 bp, Homo sapiens
aactactgcccctctcatctaattagaactaatgactggcttcttttataatttcttcttatgttttccttcatatagcagtgacgtgtagacaggagcarataggaaaaaaaaacctagcaatgaattcgtcttgttccattgttaggcactcttccgtttgtcttcatcttactacaactgtttaacttaggtattgtt

SEQ ID NO: 52864 - DNA, 201 bp, Homo sapiens; identical to SEQ ID NO: 18529

SEQ ID NO: 52865 - DNA, 201 bp, Homo sapiens
taataagtggaagagtaactactgcccctctcatctaattagaactaatgactggcttcttttataatttcttcttatgttttccttcatatagcagtgaygtgtagacaggagcaaataggaaaaaaaaacctagcaatgaattcgtcttgttccattgttaggcactcttccgtttgtcttcatcttactacaactgtt

SEQ ID NO: 52866 - DNA, 201 bp, Homo sapiens; identical to SEQ ID NO: 2015

SEQ ID NO: 52867 - DNA, 201 bp, Homo sapiens
agtgacaaagtgatatatgcctgttcaaaaaacaacacttgtggctgacagtccctcaagccccagtgattttagccctgcgggaaggatgccttattcaygaaatttacatatgtagagatttgcattcttctctagtcaataataatgataatgataagagccaatactctaaagcacttactatattctaagcataca

SEQ ID NO: 52868 - DNA, 201 bp, Homo sapiens
catgaatattttaaaaataagtgacaaagtgatatatgcctgttcaaaaaacaacacttgtggctgacagtccctcaagccccagtgattttagccctgcrggaaggatgccttattcacgaaatttacatatgtagagatttgcattcttctctagtcaataataatgataatgataagagccaatactctaaagcactt

SEQ ID NO: 52869 - DNA, 201 bp, Homo sapiens
ggtaatccccgtagagctttaagaaaacaagctatggatgaagtaaatcagaaagctatcatataataaaaatacactcagatgttcaacagtcaaatcawacttctttttcttcttcttcttttttttttttttttttttttttttttttgagaaagagcctcgctctgtcaccaggctggagtgcagtggtgcgatctt

SEQ ID NO: 52870 - DNA, 201 bp, Homo sapiens
tagtaatagatgatcctcaagtctcagaggctgatgacaatataggttcatttcttctttatagtacatgtccatataggtcagcagtgactctcaacatwgttttcactctggaacttgagttgatagagaagcctccctttgtatcattgctgatcctgtgacaaaggaaaaagaaaattgcaagccacatactggctc

SEQ ID NO: 52871 - DNA, 201 bp, Homo sapiens
gtttttgatttttttgttttttgttttgtttttggatgttaagaggacacgttttagttgaattctcatgagcactgatgcattaagtatagtaacccctwcttggctttggaaaactggtcattttccattacagaatgtgtttgccactgacttccctcagaaatgacaatccttgtgactacttcatccacagtcatt

SEQ ID NO: 52872 - DNA, 201 bp, Homo sapiens; identical to SEQ ID NO: 9410

SEQ ID NO: 52873 - DNA, 201 bp, Homo sapiens
ctctactaaaaatacaaaattagctgggcatggtggcacatgcctgtaatcccagctgctcgggaagctgaggcaggaggatcacttgaacccaggaggcrgaggttatggtgagtcgagatcgcgccattgcactccagcctgggcaacaagagcgaaactccatctcaaattaaaaaaaagaaaaaagttgttaatctg

SEQ ID NO: 52874 - DNA, 201 bp, Homo sapiens
gaggaatctggggcttcatctggtcacactgggttgaatctctaggagctctctatgggtgtattgccacactgctatgaagaaatatccaagactcagtratttataagaaaaagaggtttaattgactcacagttccgcagggctgggaaggactcgggaaacttacaatcatggtggaaggtgcctcctcacatggca

SEQ ID NO: 52875 - DNA, 201 bp, Homo sapiens
agtatctttagtgaactattttaatgaagtctatttccccctctgtgtgaagcctcttctattatctcttcagagaatgcagcctgggacatgaccacagwcacccagggataacaatagtttcaggagagttctgtttatttccttaggtgatctataaatatgtctgcttcatttggtatcacatccagcttgttagtt

SEQ ID NO: 52876 - DNA, 201 bp, Homo sapiens
ctgcctcagcctcccgagtagctgggattacaggtgtgtgccaccatgtgcagctaatttttgtaattttagtagagacagggtttcaccaggttggccaggctggtcttgaactcctgacctcaggtgatccacccgcctcagcctcccaaagtgctgggattacaggcatgagccactgcacccagccaactcatactt

SEQ ID NO: 52877 - DNA, 201 bp, Homo sapiens; identical to SEQ ID NO: 18546

SEQ ID NO: 52878 - DNA, 201 bp, Homo sapiens; identical to SEQ ID NO: 9417

SEQ ID NO: 52879 - DNA, 201 bp, Homo sapiens; identical to SEQ ID NO: 13026

SEQ ID NO: 52880 - DNA, 201 bp, Homo sapiens
tttcttccttccctttgggtaccggagcttttttctgattcccctctctccatgctgacatcgcttctaattcgccctggtgtctccctccctcacaattrctgggagtaattttagcaacttttcctctgaactaccgctggcgtgttcacagcaaatggcccctgttttggcttgacacttgatcagggtggtgacaga

SEQ ID NO: 52881 - DNA, 201 bp, Homo sapiens
cctccctacagaacgcttttgatgtgctgggcttcacttcagaggagaaaaactccatgtataagctgacaggcgccatcatgcactttggaaacatgaarttcaagctgaagcagcgggaggagcaggcggagccagacggcactgaaggtgggaggcagggattcttgggggcagctgtcaagtcatggagggccatgt

SEQ ID NO: 52882 - DNA, 201 bp, Homo sapiens
ccctctgccctgtgcacaaacaacgagtgcctcattcctcccctgcaccaagtgccctgcctcttcctgccccgtttcttccttccctttgggtaccggakcttttttctgattcccctctctccatgctgacatcgcttctaattcgccctggtgtctccctccctcacaattactgggagtaattttagcaacttttcc

SEQ ID NO: 52883 - DNA, 201 bp, Homo sapiens
caactccactggacctcagcagccctcaaccgagttaccgtgttccccacacagaggagatctccgacttgactgagcagttgggttccagcggaaagacyatccatgagctggagaaggtccgaaagcagctggaggccgagaagatggagctgcagtcagccctggaggaggccgaggtgtgtgtgtgtgcagggcacg

SEQ ID NO: 52884 - DNA, 201 bp, Homo sapiens
caggtgtgagccaccaacgcccagcctgctcctatctggtggcctgaccaatgtcaccacttggcctgggtcaactcctgctggacctcaggacacactgscttgtcatgagggaagctcagtgggcagcagtcaagcagtgatgcctatcccagctcagggctggactgtgggcctagactgagtctaggacagtctgag

SEQ ID NO: 52885 - DNA, 201 bp, Homo sapiens
gcccacagtgtgtctgctgtgtgtagactctgcttgtgcaatctctaatggcctgagtagccctggaaacaaaatgtggctatccccatgttacagatgayaaaactggctcaaagcaattatatgactgacgtagaccacacagctagaaaatggaatcactgggtttcaaagtggatttttgtgactgactccaaagct

SEQ ID NO: 52886 - DNA, 201 bp, Homo sapiens
agtgtttgacaacacaggaggactctgccccggccccacctccttctcctctcagggaagctttttgctcgaattatgtttctgatccgaatataagacgwacaaaaggtttgtctgagggcagagtgcttccgtctggggcagggcactgtggcagggaaaggcagtggggagggctgcagaagcccatacctcctcaat

SEQ ID NO: 52887 - DNA, 201 bp, Homo sapiens
aaaacctgctgcggctgcaggacctggtagacaagctgcagctaaaggtcaaggcctacaagcgccaggccgaggaggcggtgagtgaccctgctggggaytaggcccaggggaggcataggagagctcgtcccccaagccaggagtctgagaacccaggccccctctcacctcatgctcccacctcccgcaggaggagca

SEQ ID NO: 52888 - DNA, 201 bp, Homo sapiens
ggttcatactaacctgcctcttatagctcagtgatcttaggttagggaagtcccctaacctttctgagcctgtttccctctccccagccaggtaaaatggyggtgatgatgaccatgtctggtgtggggaggagctcagggccaatggccatgaagcttttcttaaatagttcactgctgtattggcattctttgttatca

SEQ ID NO: 52889 - DNA, 201 bp, Homo sapiens
agacagttgtggattttgggtgtagataacctggcagcttcttgcccagggctcctactctcgggtaggcccaggcattctctcctgatttgaggcttgcyggtctccagtagtattgttcactgcccaataagcccctgtcttcacagcggagaatccggagcagggaagacagtcaacaccaagagggtcatccagtac

SEQ ID NO: 52890 - DNA, 201 bp, Homo sapiens
aagacagttgtggattttgggtgtagataacctggcagcttcttgcccagggctcctactctcgggtaggcccaggcattctctcctgatttgaggcttgytggtctccagtagtattgttcactgcccaataagcccctgtcttcacagcggagaatccggagcagggaagacagtcaacaccaagagggtcatccagta

SEQ ID NO: 52891 - DNA, 201 bp, Homo sapiens
ccaacagaccagagcctcccaaacccgaaaggagagaaacaaagtgtgattgatttcccaaatgcagaaaagactacccaagtccccagccaaggaaggasgctggcctgtggtgaagacactggctttgaaatggctcaactacgtcccaagcaccctttgtgcatcttaattgccctgggaaatcagggaggggtggca

SEQ ID NO: 52892 - DNA, 201 bp, Homo sapiens
ctaccaacttttcccaaaacagcccaggcccatctcccctgtttactttgcccagccaagcacaggctcagcctgcccaaaccagtgccttctggtggcawccttcctggtgccagccctgacctctgtgcatcagaagacagttgtggattttgggtgtagataacctggcagcttcttgcccagggctcctactctcgg

SEQ ID NO: 52893 - DNA, 201 bp, Homo sapiens
caaaatgtacctgctgcacccatcccccaggcctgcctcactccttccaagctgacagctaatcagatggactaatccgcatgcgcggaagagctgtgctygggaagaagggggagatttcacaccaaatcgtgcagtggttgcctagacacggagccagtcaagcttgcatgccccgttgctagaagagcatggcatcgg

SEQ ID NO: 52894 - DNA, 201 bp, Homo sapiens
tgctacttgccttttccttccagaggctgacaagtctgcctacctcatggggctgaactcagccgacctgctcaaggggctgtgccaccctcgggtgaaartgggcaatgagtacgtcaccaaggggcagaatgtccagcaggtgggtccatcttcagatgataatgggtgggcagggtagggagactggcatggtgggat

SEQ ID NO: 52895 - DNA, 201 bp, Homo sapiens
acagcctcttccctctctccaggtcccctgcaggccttggcccctttcctcatctgtagacacacttgagtagcccaggtaagaaaagctgaagctagagygttgaaaatctagtaagactgggcattagagccccaaagccagcctatggaactctagtttctgccatgtgctggagagaatatcttggctatcaagagc

SEQ ID NO: 52896 - DNA, 201 bp, Homo sapiens
ctctgcagggcaccctggaggaccagatcatccaggccaaccctgctctggaggcctttggcaatgccaagaccgtccggaacgacaactcctcccgcttygtgagtggtccctgaccttggccttgggacttggactggtggaggaatggtctcagatatgagccttcccccaactcatcaccactctcttccatctctc

SEQ ID NO: 52897 - DNA, 201 bp, Homo sapiens
aaggggctgaaggatccgagcccttggttccagagcctatgttgtgctgagcacccaggacagggtggcaccagggacagctgatttcccaggggcttgaragtggacacatggaggatgggcacctgcatgatgacctcccacacctgcatgtttattgggcctggtttatgcatccaaggatcaggaagtgtgagggtg

SEQ ID NO: 52898 - DNA, 201 bp, Homo sapiens
cagcttagtgaacttgggccagtcccataacccctctgggcttaatttactcatctagaacattggatatatctgttctggctaccacctatgataatagktgtgaatcatataaaaaaggaatgtgaaagccttttagttaaaaatgtggctagaagaaaatgaaacaaatgattattactaactgacttgctaagatta

SEQ ID NO: 52899 - DNA, 201 bp, Homo sapiens
ctggtgtctccctccctcacaattactgggagtaattttagcaacttttcctctgaactaccgctggcgtgttcacagcaaatggcccctgttttggcttsacacttgatcagggtggtgacagagtgcagacaaagccggcacaatgcggggaggggaggacgggggacagatcaccttcctttcacttcaggccttatt

SEQ ID NO: 52900 - DNA, 201 bp, Homo sapiens
gagcgagcggcgcatcaaggagctcacctaccaggtgcgacgggcggtgactccaggcagagccctggcaccatagccacagtgacaaccagctgaggagwatgaagagtttgctcttagcctcttccagggcgaggatgggaatgcagcccccgtttcactttgcctagccctgccccactctgaatgtcccctagctca

SEQ ID NO: 52901 - DNA, 201 bp, Homo sapiens
agaacatcgccatcgtggagcggcgcaacaacctgctgcaggctgagctggaggagttgcgtgccgtggtggagcagacagagcggtcccggaagctggcrgagcaggagctgattgagactagtgagcgggtgcagctgctgcattcccaggtgagcagctcccctgctcattcctgaagggagcacaggctggggctca

SEQ ID NO: 52902 - DNA, 201 bp, Homo sapiens
gagcaaggcggaggagacccagcgttctgtcaacgacctcaccagccagcgggccaagttgcaaaccgagaatggtgagcctagagcaggggctccatggwtcccaccacagtctccccaacctcctgagccactccagcctcgggcacaagccaatacacgcacacacagacacagagtctctccagaaaatggggcctg

SEQ ID NO: 52903 - DNA, 201 bp, Homo sapiens
aagggcagagggaaaagagctgacttttaaaagcacaggctttctacttgggttcaacctagatacacagcttaattattttgtgaccttgggcagaccakgcatcatctttgagcctcaatttcctctagacagggaataaagctgtccatttcattaagccatcatacataagtgcttggcatcagcaaatgcaattcc

SEQ ID NO: 52904 - DNA, 201 bp, Homo sapiens; identical to SEQ ID NO: 13054

SEQ ID NO: 52905 - DNA, 201 bp, Homo sapiens
atggacattacctcatcagtggccctacaaccccttggatagctggttgtccaagacagaatcttagttcaactttaaatttacctgcagaaccacttaakcccccaatgagacatattcaaattgttaatccatttttggctaattaggagacagaggctcagggacctgggttcaagacctggctctgttcttgatcag

SEQ ID NO: 52906 - DNA, 201 bp, Homo sapiens
atctgaacaagctgatgaccaacttgcgctccacccatccccactttgtacgttgtatcatccctaatgagacaaagtctccaggtgaggccacaaactcrggccaacccactgctgggcatacaccgccctgggaacaggacctcctaggacatctccctacctaccaccacagtggtttccaaaccacattcttctcct

SEQ ID NO: 52907 - DNA, 201 bp, Homo sapiens
cctaccaacttttcccaaaacagcccaggcccatctcccctgtttactttgcccagccaagcacaggctcagcctgcccaaaccagtgccttctggtggcwtccttcctggtgccagccctgacctctgtgcatcagaagacagttgtggattttgggtgtagataacctggcagcttcttgcccagggctcctactctcg

SEQ ID NO: 52908 - DNA, 201 bp, Homo sapiens
ttccggcagaggtgggtatgagggtgcaccagagctcatagaacagggggagccaggctgccctgatgggaatgggatctgcaggtgaccctggaattctrtgggcagagcagatcactgcagagcatgggtgactctggacacttccctcctcaggtatcgcatcctgaacccagcggccatccctgagggacagttcat

SEQ ID NO: 52909 - DNA, 201 bp, Homo sapiens
ctctgctcccctccccagtgttcccaagttatactatcctgaaactcttcccctccccatacttctgaagctcttgccaagtggggatatcctagagttaycctcctatttgagtgatgtgcctctccttccctctacctgcaagaatgaggaccttaccccctgaacagcctcccctctgttcctcaccttcaggaacaa

SEQ ID NO: 52910 - DNA, 201 bp, Homo sapiens
acacgcaacagagaacaaggtaagggcagctccctttggctccagcccgggtctcatcaggactctcagaccatactgaccttgacccaggctagccactyggcatccagagagcagcatggaccttgacatggagctccccacagatggcaccaagctggtgacctttgaccctaaaggagatgggattcttggtcggca

SEQ ID NO: 52911 - DNA, 201 bp, Homo sapiens
atggcaccaagctggtgacctttgaccctaaaggagatgggattcttggtcggcaggtgaaaaacctgacagaggagatggctgggctggatgagatcatygccaagctgaccaaggagaagaaagctctgcaagaggcccaccaacaggctctggatgaccttcaggccgaggaggacaaggtcaacaccctgactaagg

SEQ ID NO: 52912 - DNA, 201 bp, Homo sapiens
ccttgacatggaggaaggctccacatgagagcctcttaggaaagtccctttgtggcttttcacagagagcccacagggcaccaagaaatgccctcacattmaagaagtcaggggatcagggccatttctttgttttgcttaacttgtggttccaattcttagtgtaagttcttccaaaatgtatagactttccagacttgg

SEQ ID NO: 52913 - DNA, 201 bp, Homo sapiens
ctcaggtaggaaggaggcaggaggctcagcactcctttcaatgggcccctgcagagactccctgctggtaatccagtggaacattcgggccttcatggggrtcaagaattggccctggatgaagctctacttcaagatcaagccgctgctgaagagtgcagaaagagagaaggagatggcctccatgaaggaggagttcac

SEQ ID NO: 52914 - DNA, 201 bp, Homo sapiens
ctccttttctatccccagacctactcgggcctcttctgtgtcaccgtcaacccttacaagtggctgccggtgtacactcctgaggtggtggctgcctaccrgggcaagaagaggagcgaggccccgccccacatcttctccatctccgacaacgcctatcagtacatgctgacaggtgagaggccctggaagggtcttcct

SEQ ID NO: 52915 - DNA, 201 bp, Homo sapiens
actgtcccatccccagagcctaggacagagcctggcacatagtaggcattcagtgaagatttgtggagtgaatgaatgaccagtcactgaactctcttcayataaacattttacccattgcatcttagctgagcttcccatttccacatacctcccggttcccacctctgcctccctctgttttcttttatactctatacc

SEQ ID NO: 52916 - DNA, 201 bp, Homo sapiens; identical to SEQ ID NO: 13075

SEQ ID NO: 52917 - DNA, 201 bp, Homo sapiens
ctcttcccgtcatctcctggcctcttcacttatttacttcccatctcccttctctcctctttcccttctgtctcccaccctctctccttatccctgtctgsccccagggccccttcatctctgtgacttctcgaattctctccatctctcttttccttccttcttctcctctcttcttcctgcatctctttctggcatttt

SEQ ID NO: 52918 - DNA, 201 bp, Homo sapiens
tctcttcccgtcatctcctggcctcttcacttatttacttcccatctcccttctctcctctttcccttctgtctcccaccctctctccttatccctgtctscccccagggccccttcatctctgtgacttctcgaattctctccatctctcttttccttccttcttctcctctcttcttcctgcatctctttctggcattt

SEQ ID NO: 52919 - DNA, 201 bp, Homo sapiens
actggtaactcctcttgactcttgagcatggtgctaggttttggggctcccactgaaggggagagcccagggagggaagggaagaatgggcagatgggagkgcagccagcttctgctcactccaggcacagccatgggagattcggagatggcagtctttggggctgccgccccctacctgcgcaagtcagagaaggagcg

SEQ ID NO: 52920 - DNA, 201 bp, Homo sapiens
actcactcgctcccacattcaacagctatttgcttagagccagctgtggaccagacatgggaaggcagtggggactgtgtggtgacagaggcagtcatttwctctgtcttcaggggaagccctccttcactgccttgacatggaggggaccagccacgccctgctgggctcaggcacagtggacgggcacagccccaatgg

SEQ ID NO: 52921 - DNA, 201 bp, Homo sapiens
taccaactttgctacttgccttttccttccagaggctgacaagtctgcctacctcatggggctgaactcagccgacctgctcaaggggctgtgccaccctygggtgaaagtgggcaatgagtacgtcaccaaggggcagaatgtccagcaggtgggtccatcttcagatgataatgggtgggcagggtagggagactggca

SEQ ID NO: 52922 - DNA, 201 bp, Homo sapiens
atgccccctgcagttcaacagctttgagcagctctgcatcaacttcaccaacgagaagctgcagcagttcttcaaccaccacatgtttgtgctggagcagraggagtacaagaaggagggcatcgagtggacattcattgactttggcatggacctgcaggcctgcattgacctcatcgagaaggtgcctctttggcctta

SEQ ID NO: 52923 - DNA, 201 bp, Homo sapiens
cattgcccagggcagtgtggactctagctttctgaggtgttttctagaatcagactctgaattagaatttgtttcttttccaatccaggatgtcactatcyctctaagcacactttgtccttaacttagattaagtcagtgttttcctggcctgcattgcagcccaggaaattccatcacactcatagccccaaagtcact

SEQ ID NO: 52924 - DNA, 201 bp, Homo sapiens
caagccgctgctgaagagtgcagaaagagagaaggagatggcctccatgaaggaggagttcacacgcctcaaagaggcgctagagaagtccgaggctcgcygcaaggagctggaggagaagatggtgtccctgctgcaggagaagaatgacctgcagctccaagtgcaggcggtgaggctcctgggctactgttggctctt

SEQ ID NO: 52925 - DNA, 201 bp, Homo sapiens
tgtagctgctactgtattccctttcagaatctccctgatcccagcctccagccccatcaggtgtcccaggccccgaggcatagactcagcctctttccccscaacctcgtgcccatctccttcttctctgaccattaccctgacccctctctttgctctccctcttcctttctgctttccatccccttcatgtttttcctc

SEQ ID NO: 52926 - DNA, 201 bp, Homo sapiens
accaggtgatgcagcagaacccacccaagttcgacaaaatcgaggacatggccatgctgaccttcctgcatgagcccgcggtgctctacaacctcaaggakcgctacggctcctggatgatctacgtgagtgctgcacctggccctacgttgggatctctgttcttgctccatccatgtccaccccaggagccaagagtgt

SEQ ID NO: 52927 - DNA, 201 bp, Homo sapiens
caatatcccttctgtcttccctgtgagatcctggttccttctctcttgagcactattgccctgtcactcaccaactcctaaccctcttgaggaaggagggraagcccaggctgacaggagggcttgggtgggggctcttgcagacagtgaccgtgaaggaggaccaggtgatgcagcagaacccacccaagttcgacaaaa

SEQ ID NO: 52928 - DNA, 201 bp, Homo sapiens; identical to SEQ ID NO: 13106

SEQ ID NO: 52929 - DNA, 201 bp, Homo sapiens
accaactttgctacttgccttttccttccagaggctgacaagtctgcctacctcatggggctgaactcagccgacctgctcaaggggctgtgccaccctckggtgaaagtgggcaatgagtacgtcaccaaggggcagaatgtccagcaggtgggtccatcttcagatgataatgggtgggcagggtagggagactggcat

SEQ ID NO: 52930 - DNA, 201 bp, Homo sapiens; identical to SEQ ID NO: 13110

SEQ ID NO: 52931 - DNA, 201 bp, Homo sapiens
cttttgacctcaagaaggatgtcttcgtgcctgatgacaaacaggagtttgtcaaggccaagatcgtgtctcgagagggtggcaaagtcactgccgagacygagtatggcaaggtgggtgtcaggctgatgtgagagtccaccctggccacctgtacacctgggtggacagagaggggtacacccatgccccatgcccatg

SEQ ID NO: 52932 - DNA, 201 bp, Homo sapiens; identical to SEQ ID NO: 13111

SEQ ID NO: 52933 - DNA, 201 bp, Homo sapiens; identical to SEQ ID NO: 13112

SEQ ID NO: 52934 - DNA, 201 bp, Homo sapiens
cactggtctcatagctccagcttccttcaggaaagcaaaacatcttccattggttgccccactcttacctccatttcccccaaacggaacactgtccttcytcctacgtgtcccttttgccattattcccatccttgccgacatcgtgcagtcatgcctctcccttcctcatttcttgcgtccaggctgttagcaaggcat

SEQ ID NO: 52935 - DNA, 201 bp, Homo sapiens
gctggccacctgctcttcttgaaatgcttcttttggcttctaggaaactgcccatttctcactctccttagctgtctttgaatctccttctcttctctgcrggcttctcttccttctcccatcgctgtactgtgggtatctcccaggcctttcctcttctctccaacctcatggcttctttcacatcccccgaggtagtca

SEQ ID NO: 52936 - DNA, 201 bp, Homo sapiens
aagcagctggaggccgagaagatggagctgcagtcagccctggaggaggccgaggtgtgtgtgtgtgcagggcacggggtgcagggagctgagctccaggmttttggtccctgttctcatcccccgctttgtcgttttgttcactgtcccatccccagagcctaggacagagcctggcacatagtaggcattcagtgaaga

SEQ ID NO: 52937 - DNA, 201 bp, Homo sapiens
gttcacatccatcagaaagcagagacctagagtagggaatgagagggggtgcacaagtacaaaagattttgaagccagcaggaagacaaaagaatgacaasaaggagcagctgtttgtaaagggaaatctgagacaggcagaaagctcagctccctaatcctaggctcgtgtggagccagggcagggtccccccaaggtca

SEQ ID NO: 52938 - DNA, 201 bp, Homo sapiens
agtcacagggtcagaggcctcaggaagggtgggagggatgaaggaaatgggatattcccaaggtttcaggacctcaggtaggaaggaggcaggaggctcarcactcctttcaatgggcccctgcagagactccctgctggtaatccagtggaacattcgggccttcatgggggtcaagaattggccctggatgaagctcta

SEQ ID NO: 52939 - DNA, 201 bp, Homo sapiens
cttacccatcatacttctttttctggggtccgccaatatggggcctccctacagaacgcttttgatgtgctgggcttcacttcagaggagaaaaactccaygtataagctgacaggcgccatcatgcactttggaaacatgaagttcaagctgaagcagcgggaggagcaggcggagccagacggcactgaaggtgggagg

SEQ ID NO: 52940 - DNA, 201 bp, Homo sapiens
gtgtgtgtgtgtgtgtgtgtgtgtgtgtgtgtgtgtttgtgtttatgtttagaggggggtagggttagaggatgttaacttttctgatatctttctagaarggagctggggaatgaaaagtcagaggtggtgatcaattctgaattatgtatctaatctcactggtatgatcaataatagagatgagttttcttatttaat

SEQ ID NO: 52941 - DNA, 201 bp, Homo sapiens
aatctacatcctcatcaagtttgtgtttgcacaggaatcttcataccttcccaggcacagaatgtgttgaataaatgaataaatacacgatcctatttgaytctcaaaacaccttttaaggatggtatctttaatttcactttaccaaagaggaaaataagtttcagaaaggttagctgagttacccaaagcaatagtgac

SEQ ID NO: 52942 - DNA, 201 bp, Homo sapiens
ggcacgagatggccttgcccgggcacggctaggggatgtagggactgcacaaatgggtcctgggatttgcagggccacctgaaaactggagaaagaaattmaactggagcctattcctagcactttgctggactcatgaaaaaggagaaagaacatgatttttaaaaaactccagggttcatactaacctgcctcttatag

SEQ ID NO: 52943 - DNA, 201 bp, Homo sapiens
tctatacctgattgcctctgtttccttggcaacacttttctcttcattttcctccttgtcttcatagctggctctcccctgtgagggcctgaatcactttytcttaggcttatttttattttctcttagattctcttttcctccaccttctgcttctttgaaccacttacaccactcttgaagtcacttcgtatccatgat

SEQ ID NO: 52944 - DNA, 201 bp, Homo sapiens
gcagaagctggaagcgcgggtgcgggagctggagaatgagctggaggccgagcagaagcgcaacgcagagtcggtgaagggcatgaggaagagcgagcggsgcatcaaggagctcacctaccaggtgcgacgggcggtgactccaggcagagccctggcaccatagccacagtgacaaccagctgaggagaatgaagagtt

SEQ ID NO: 52945 - DNA, 201 bp, Homo sapiens; identical to SEQ ID NO: 13134

SEQ ID NO: 52946 - DNA, 201 bp, Homo sapiens
cttacgtggcacacatcctgaaatgtgcacatttgctgttgaggcatatatggcaccctggggttggggtgcggattgaggtatgggaaggaagcctgtcytcatgtgagaggcatgcccaagcagcaggcatgagtgttcatcagagggcttgtggagggtgtttggctatgtgatgggtgtgtctgtgagaggaagccc

SEQ ID NO: 52947 - DNA, 201 bp, Homo sapiens
cgacaaaatcgaggacatggccatgctgaccttcctgcatgagcccgcggtgctctacaacctcaaggatcgctacggctcctggatgatctacgtgagtsctgcacctggccctacgttgggatctctgttcttgctccatccatgtccaccccaggagccaagagtgtcttctgtttgtgtctaggcagggttacactc

SEQ ID NO: 52948 - DNA, 201 bp, Homo sapiens
tctaggaagtgtgtatgccttcatgtgattctgtgaggcctggaatgtgtagctacccctgtccatgcatgcagaggttcttgtctatgcctccacgagtmatgactgttatagtatctgtaccctctgcagaaggaactcacaggcacgggggtgtaggatgttccaggtctttgtgtactgaagaacacgcagtgatgt

SEQ ID NO: 52949 - DNA, 201 bp, Homo sapiens
cttcagaggagaaaaactccatgtataagctgacaggcgccatcatgcactttggaaacatgaagttcaagctgaagcagcgggaggagcaggcggagccrgacggcactgaaggtgggaggcagggattcttgggggcagctgtcaagtcatggagggccatgtctgctcagcagtcatctctcttctcttttttctttt

SEQ ID NO: 52950 - DNA, 201 bp, Homo sapiens
gccagacggcactgaaggtgggaggcagggattcttgggggcagctgtcaagtcatggagggccatgtctgctcagcagtcatctctcttctcttttttctttttttttttttttgagatggagtcttgctctgttgcccaggctggagcgcagtggcacgatcttggctcactgccacctccacatcctgggttcaagtg

SEQ ID NO: 52951 - DNA, 201 bp, Homo sapiens; identical to SEQ ID NO: 9432

SEQ ID NO: 52952 - DNA, 201 bp, Homo sapiens
gaccctgcacagtccatgccataacaatgacgaccacttccaattgtttcctagctggagaggcggggaggggagcactgtttgggaagggggggagcctsggggaaatgcttctagtgacaacagccctttctaaatccggctagggactgggtgccgttgggggtgggggtgccctgctgccccatatatacagcccct

SEQ ID NO: 52953 - DNA, 201 bp, Homo sapiens
atcaaggggaagcctgaagcccacttctccctgatccactatgccggcatcgtggactacaacatcattggctggctgcagaagaacaaggatcctctcartgagactgtcgtgggcttgtatcagaagtcttccctcaagctgctcagcaccctgtttgccaactatgctggggctgatgcgcgtaagtagggactgagg

SEQ ID NO: 52954 - DNA, 201 bp, Homo sapiens; identical to SEQ ID NO: 13143

SEQ ID NO: 52955 - DNA, 201 bp, Homo sapiens
tctttgttcacatccatcagaaagcagagacctagagtagggaatgagagggggtgcacaagtacaaaagattttgaagccagcaggaagacaaaagaatkacaagaaggagcagctgtttgtaaagggaaatctgagacaggcagaaagctcagctccctaatcctaggctcgtgtggagccagggcagggtccccccaa

SEQ ID NO: 52956 - DNA, 201 bp, Homo sapiens
gtacctccctctcagcgctaccttgcacttgcagtgtgtaatgagggtgatgtgtaaggcactctgatggacattacctcatcagtggccctacaaccccytggatagctggttgtccaagacagaatcttagttcaactttaaatttacctgcagaaccacttaatcccccaatgagacatattcaaattgttaatccat

SEQ ID NO: 52957 - DNA, 201 bp, Homo sapiens
ccgcttcgtgagtggtccctgaccttggccttgggacttggactggtggaggaatggtctcagatatgagccttcccccaactcatcaccactctcttccmtctctccaggggaaattcattcgaattcattttggggcaacaggaaagttggcatctgcagacatagagacctgtgagtgccatgaatctgctaggctca

SEQ ID NO: 52958 - DNA, 201 bp, Homo sapiens; identical to SEQ ID NO: 13144

SEQ ID NO: 52959 - DNA, 201 bp, Homo sapiens; identical to SEQ ID NO: 13145

SEQ ID NO: 52960 - DNA, 201 bp, Homo sapiens
ggcctgagggctagaggaggaggtggggatagagaggagtgctgatctagaatggtgcttccccaggtgagctgtcccggcagctggatgagaaggaggcrctgatctcccagctgacccgaggcaagctcacctacacccagcagctggaggacctcaagaggcagctggaggaggaggttaaggtaagggctagactcg

SEQ ID NO: 52961 - DNA, 201 bp, Homo sapiens
agggtgtgctgggggcccaagaggctggggaggggctgcactggcagtgttcccatatggtgccacccaagggctccaagaggcgtctgggcaaagaggcrtgtccctccaactccactggacctcagcagccctcaaccgagttaccgtgttccccacacagaggagatctccgacttgactgagcagttgggttccagc

SEQ ID NO: 52962 - DNA, 201 bp, Homo sapiens
aacccagaacttcagtccagtgttctcacagactcctcctacttccttcttgccacaggggtgatggacaaccccctggtcatgcaccagctgcgctgcartggtgtgctggagggcatccgcatctgcaggaaaggcttccccaaccgcatcctctacggggacttccggcagaggtgggtatgagggtgcaccagagct

SEQ ID NO: 52963 - DNA, 201 bp, Homo sapiens
ctgcagaaggaactcacaggcacgggggtgtaggatgttccaggtctttgtgtactgaagaacacgcagtgatgtgatctacttacgtggcacacatcctsaaatgtgcacatttgctgttgaggcatatatggcaccctggggttggggtgcggattgaggtatgggaaggaagcctgtcttcatgtgagaggcatgccc

SEQ ID NO: 52964 - DNA, 201 bp, Homo sapiens
aagcttcatgcaggacttcatgcagagtaccaggtccagtcactgggcacacatgtgcaggtctaaacatgggcgtatgtgccacaggagttcctaggggmagatatctgcatctgagcatatgggaccaatatgcattacagggtgtgtgtgtgtgtgtgtgtgtgtgtgtgtgtggacaagcctgcatagtctgaatgt

SEQ ID NO: 52965 - DNA, 201 bp, Homo sapiens
ggaagaagggggagatttcacaccaaatcgtgcagtggttgcctagacacggagccagtcaagcttgcatgccccgttgctagaagagcatggcatcggtkgtgttctgtgctcgtaggctgggccccagctccctttcctcccctcctttgtggctgttcctcaggcctgcagaggggaagatttttcctgtcctgttac

SEQ ID NO: 52966 - DNA, 201 bp, Homo sapiens
gctgccattcagtgagggcccacagtgtgtctgctgtgtgtagactctgcttgtgcaatctctaatggcctgagtagccctggaaacaaaatgtggctatycccatgttacagatgacaaaactggctcaaagcaattatatgactgacgtagaccacacagctagaaaatggaatcactgggtttcaaagtggatttttg

SEQ ID NO: 52967 - DNA, 201 bp, Homo sapiens
gatggcagtctttggggctgccgccccctacctgcgcaagtcagagaaggagcggctagaagcgcagaccaggccttttgacctcaagaaggatgtcttcrtgcctgatgacaaacaggagtttgtcaaggccaagatcgtgtctcgagagggtggcaaagtcactgccgagactgagtatggcaaggtgggtgtcaggct

SEQ ID NO: 52968 - DNA, 201 bp, Homo sapiens
cccaaaacagcccaggcccatctcccctgtttactttgcccagccaagcacaggctcagcctgcccaaaccagtgccttctggtggcatccttcctggtgycagccctgacctctgtgcatcagaagacagttgtggattttgggtgtagataacctggcagcttcttgcccagggctcctactctcgggtaggcccaggc

SEQ ID NO: 52969 - DNA, 201 bp, Homo sapiens
tttttctggggtccgccaatatggggcctccctacagaacgcttttgatgtgctgggcttcacttcagaggagaaaaactccatgtataagctgacaggcrccatcatgcactttggaaacatgaagttcaagctgaagcagcgggaggagcaggcggagccagacggcactgaaggtgggaggcagggattcttgggggc

SEQ ID NO: 52970 - DNA, 201 bp, Homo sapiens; identical to SEQ ID NO: 13158

SEQ ID NO: 52971 - DNA, 201 bp, Homo sapiens
tgctaagattacaagctaatcagtgacaaagccaggatcagaacccagaacttcagtccagtgttctcacagactcctcctacttccttcttgccacaggsgtgatggacaaccccctggtcatgcaccagctgcgctgcaatggtgtgctggagggcatccgcatctgcaggaaaggcttccccaaccgcatcctctacg

SEQ ID NO: 52972 - DNA, 201 bp, Homo sapiens
acggggacttccggcagaggtgggtatgagggtgcaccagagctcatagaacagggggagccaggctgccctgatgggaatgggatctgcaggtgaccctrgaattctatgggcagagcagatcactgcagagcatgggtgactctggacacttccctcctcaggtatcgcatcctgaacccagcggccatccctgaggga

SEQ ID NO: 52973 - DNA, 201 bp, Homo sapiens
gtacccctccctagtcatggccaacacacaccttgcctgcaggtgttcttcaaggccgggctgctggggctgctggaggaaatgagggacgagaggctgarccgcatcatcacgcgtatccaggcccagtcccgaggtgtgctcgccagaatggagtacaaaaagctgctggaacgtaggtgagagatctcaagaggaggt

SEQ ID NO: 52974 - DNA, 201 bp, Homo sapiens; identical to SEQ ID NO: 9452

SEQ ID NO: 52975 - DNA, 201 bp, Homo sapiens; identical to SEQ ID NO: 9453

SEQ ID NO: 52976 - DNA, 201 bp, Homo sapiens
aagccgctgctgaagagtgcagaaagagagaaggagatggcctccatgaaggaggagttcacacgcctcaaagaggcgctagagaagtccgaggctcgccrcaaggagctggaggagaagatggtgtccctgctgcaggagaagaatgacctgcagctccaagtgcaggcggtgaggctcctgggctactgttggctcttc

SEQ ID NO: 52977 - DNA, 201 bp, Homo sapiens
acagcctcccctctgttcctcaccttcaggaacaagacaacctggcagatgctgaggagcgctgtgatcagctgatcaaaaacaagattcagctggaggcyaaggtgaaggagatgaacgagaggctggaggatgaggaggagatgaatgctgagctcactgccaagaagcgcaagctggaagatgagtgctcagagctca

SEQ ID NO: 52978 - DNA, 201 bp, Homo sapiens; identical to SEQ ID NO: 9457

SEQ ID NO: 52979 - DNA, 201 bp, Homo sapiens
tcaaaaacaagattcagctggaggccaaggtgaaggagatgaacgagaggctggaggatgaggaggagatgaatgctgagctcactgccaagaagcgcaasctggaagatgagtgctcagagctcaaaagggacatcgatgatctggagctgacactggccaaagtggagaaggagaaacacgcaacagagaacaaggtaa

SEQ ID NO: 52980 - DNA, 201 bp, Homo sapiens
ttggggctcccactgaaggggagagcccagggagggaagggaagaatgggcagatgggagggcagccagcttctgctcactccaggcacagccatgggagmttcggagatggcagtctttggggctgccgccccctacctgcgcaagtcagagaaggagcggctagaagcgcagaccaggccttttgacctcaagaaggat

SEQ ID NO: 52981 - DNA, 201 bp, Homo sapiens
ctctttgttcacatccatcagaaagcagagacctagagtagggaatgagagggggtgcacaagtacaaaagattttgaagccagcaggaagacaaaagaakgacaagaaggagcagctgtttgtaaagggaaatctgagacaggcagaaagctcagctccctaatcctaggctcgtgtggagccagggcagggtcccccca

SEQ ID NO: 52982 - DNA, 201 bp, Homo sapiens
catctctctctttgttcacatccatcagaaagcagagacctagagtagggaatgagagggggtgcacaagtacaaaagattttgaagccagcaggaagacraaagaatgacaagaaggagcagctgtttgtaaagggaaatctgagacaggcagaaagctcagctccctaatcctaggctcgtgtggagccagggcagggt

SEQ ID NO: 52983 - DNA, 201 bp, Homo sapiens
gctcaaagcaattatatgactgacgtagaccacacagctagaaaatggaatcactgggtttcaaagtggatttttgtgactgactccaaagctgaccagastgctcatcctgtatgcttctgaggcctctggccctccagaccggtcactccccacaaagtctcccttttggtgagttgtgtccctccaaacactccctga

SEQ ID NO: 52984 - DNA, 201 bp, Homo sapiens
tctctttccctcgtacccctccctagtcatggccaacacacaccttgcctgcaggtgttcttcaaggccgggctgctggggctgctggaggaaatgagggrcgagaggctgagccgcatcatcacgcgtatccaggcccagtcccgaggtgtgctcgccagaatggagtacaaaaagctgctggaacgtaggtgagagatc

SEQ ID NO: 52985 - DNA, 201 bp, Homo sapiens
ctctttccctcgtacccctccctagtcatggccaacacacaccttgcctgcaggtgttcttcaaggccgggctgctggggctgctggaggaaatgagggabgagaggctgagccgcatcatcacgcgtatccaggcccagtcccgaggtgtgctcgccagaatggagtacaaaaagctgctggaacgtaggtgagagatct

SEQ ID NO: 52986 - DNA, 201 bp, Homo sapiens
catggccaacacacaccttgcctgcaggtgttcttcaaggccgggctgctggggctgctggaggaaatgagggacgagaggctgagccgcatcatcacgcrtatccaggcccagtcccgaggtgtgctcgccagaatggagtacaaaaagctgctggaacgtaggtgagagatctcaagaggaggtttcccgcttctctga

SEQ ID NO: 52987 - DNA, 201 bp, Homo sapiens; identical to SEQ ID NO: 9468

SEQ ID NO: 52988 - DNA, 201 bp, Homo sapiens
ctctgccttagttgggtgacctctgggagcccactccagatctctgggtctccatgccctcccctgttacatggaggtttttaagagtccttcgactctgmtggcatgactttcctccttactctagagcagaagctgtgttaggtctttagttgtctggtcagacaaatacggctctctcattttcaacttttgttattt

SEQ ID NO: 52989 - DNA, 201 bp, Homo sapiens
catacctcccggttcccacctctgcctccctctgttttcttttatactctatacctgattgcctctgtttccttggcaacacttttctcttcattttcctycttgtcttcatagctggctctcccctgtgagggcctgaatcactttctcttaggcttatttttattttctcttagattctcttttcctccaccttctgct

SEQ ID NO: 52990 - DNA, 201 bp, Homo sapiens
atattgaccatagagcagaatccatgtccacctgtgtgaaggacactcagtgatgctctctcctgcttcctcagcccatgggcatcatgtccatcctggargaggagtgcatgttccccaaggccaccgacatgaccttcaaggccaagctgtttgacaaccacctgggcaaatccgccaacttccagaagccacgcaata

SEQ ID NO: 52991 - DNA, 201 bp, Homo sapiens
ctgcatcccctcccccaaccccttcccaggcctccctggagcacgaggagggcaagatcctccgggcccagctggagttcaaccagatcaaggcagagatygagcggaagctggcagagaaggacgaggagatggaacaggccaagcgcaaccacctgcgggtggtggactcgctgcagacctccctggacgcagagacac

SEQ ID NO: 52992 - DNA, 201 bp, Homo sapiens; identical to SEQ ID NO: 13178

SEQ ID NO: 52993 - DNA, 201 bp, Homo sapiens
caaaaacaagattcagctggaggccaaggtgaaggagatgaacgagaggctggaggatgaggaggagatgaatgctgagctcactgccaagaagcgcaagbtggaagatgagtgctcagagctcaaaagggacatcgatgatctggagctgacactggccaaagtggagaaggagaaacacgcaacagagaacaaggtaag

SEQ ID NO: 52994 - DNA, 201 bp, Homo sapiens
aggtccactgggggtttggacatagatgaggccaagggatgatgttgagattggggtgaggagaagggcaagggtggggttgctttatggagaaagctgarcccacctcctggtgcccacccctccccaggcgaagaacgccctggcccacgcactgcagtcggcccggcatgactgcgacctgctgcgggagcagtacga

SEQ ID NO: 52995 - DNA, 201 bp, Homo sapiens
agatcgaggacttgatggtggacgtagagcgctccaatgctgctgctgcagccctggacaagaagcagaggaacttcgacaaggtgggccctgggtggggsccgcagccagcatgcagggcaagggggcatgaggggttcagtgagaggccagagccatcctccttggaggtgggggaggagggctgagcccaggcaggtc

SEQ ID NO: 52996 - DNA, 201 bp, Homo sapiens
ggggttcagtgagaggccagagccatcctccttggaggtgggggaggagggctgagcccaggcaggtcctgagacagaccctggacatggggctgaggctkgggggctgaagagtgagccttgtccccgggcagatcctggccgagtggaagcagaagtatgaggagtcgcagtcggagctggagtcctcgcagaaggagg

SEQ ID NO: 52997 - DNA, 201 bp, Homo sapiens
actctttcctggtacagatcatttaaaatatttacacatatttggtaagaaattataaggagaattcaagtgtttagtgaggatcagaaagtagaattggstcaggatatcagatgaagcagggcagggcggaggggatgctaccttctatgactgtgccatcttcaccccctgcctaccctctggcccccagacggagga

SEQ ID NO: 52998 - DNA, 201 bp, Homo sapiens
ccatcctccttggaggtgggggaggagggctgagcccaggcaggtcctgagacagaccctggacatggggctgaggctggggggctgaagagtgagccttstccccgggcagatcctggccgagtggaagcagaagtatgaggagtcgcagtcggagctggagtcctcgcagaaggaggctcgctccctcagcacagagct

SEQ ID NO: 52999 - DNA, 201 bp, Homo sapiens
tggaggccgagaagatggagctgcagtcagccctggaggaggccgaggtgtgtgtgtgtgcagggcacggggtgcagggagctgagctccaggcttttggsccctgttctcatcccccgctttgtcgttttgttcactgtcccatccccagagcctaggacagagcctggcacatagtaggcattcagtgaagatttgtgg

SEQ ID NO: 53000 - DNA, 201 bp, Homo sapiens
gctggctccctgctcatgcccactctcctgatcctcaggacacccagattcagctggacgatgcagtccgtgccaacgacgacctgaaggagaacatcgcmatcgtggagcggcgcaacaacctgctgcaggctgagctggaggagttgcgtgccgtggtggagcagacagagcggtcccggaagctggcggagcaggagc

SEQ ID NO: 53001 - DNA, 201 bp, Homo sapiens
tttgggctttgctagtcacccccacagcaggcatacccagacagagcaccctcaaacccgggatgcttccttttcatttattccacacacttgagccacayggccccagaggccaaggtaatgcagttctctgtgatttcaaggattcttccagctctaactttttttttttttttttttgagacggtgtctcactctgcc

SEQ ID NO: 53002 - DNA, 201 bp, Homo sapiens
gatgcttccttttcatttattccacacacttgagccacatggccccagaggccaaggtaatgcagttctctgtgatttcaaggattcttccagctctaactttttttttttttttttttgagacggtgtctcactctgccgcccaggctggagtgcagtggcacaatctcagctcactgcaacctctgcctcctgggttct

SEQ ID NO: 53003 - DNA, 201 bp, Homo sapiens
atgcttccttttcatttattccacacacttgagccacatggccccagaggccaaggtaatgcagttctctgtgatttcaaggattcttccagctctaactttttttttttttttttttgagacggtgtctcactctgccgcccaggctggagtgcagtggcacaatctcagctcactgcaacctctgcctcctgggttctc

SEQ ID NO: 53004 - DNA, 201 bp, Homo sapiens
actcctcctacttccttcttgccacaggggtgatggacaaccccctggtcatgcaccagctgcgctgcaatggtgtgctggagggcatccgcatctgcagkaaaggcttccccaaccgcatcctctacggggacttccggcagaggtgggtatgagggtgcaccagagctcatagaacagggggagccaggctgccctgat

SEQ ID NO: 53005 - DNA, 201 bp, Homo sapiens
ctggtctccagtagtattgttcactgcccaataagcccctgtcttcacagcggagaatccggagcagggaagacagtcaacaccaagagggtcatccagtmctttgctgttattgcagccattggggaccgcagcaagaaggaccagagcccgggcaaggtaggcctgctgccctccaaggtcctgtaccgcagaaaggga

SEQ ID NO: 53006 - DNA, 201 bp, Homo sapiens
atgggcagagcagatcactgcagagcatgggtgactctggacacttccctcctcaggtatcgcatcctgaacccagcggccatccctgagggacagttcaytgatagcaggaagggggcagagaagctgctcagctccctggacattgatcacaaccagtacaagtttggccacaccaaggtgaggaaaggagactaatta

SEQ ID NO: 53007 - DNA, 201 bp, Homo sapiens
agcgctccaatgctgctgctgcagccctggacaagaagcagaggaacttcgacaaggtgggccctgggtgggggccgcagccagcatgcagggcaaggggrcatgaggggttcagtgagaggccagagccatcctccttggaggtgggggaggagggctgagcccaggcaggtcctgagacagaccctggacatggggctg

SEQ ID NO: 53008 - DNA, 201 bp, Homo sapiens
ctggcattactcagattgagtgcatgcagaggttttcctttctcttctttctctcctgggatctttctctaactcccaaaatcaccagccctcccccttcrcaactggcaagtcactgctccttttctatccccagacctactcgggcctcttctgtgtcaccgtcaacccttacaagtggctgccggtgtacactcctga

SEQ ID NO: 53009 - DNA, 201 bp, Homo sapiens; identical to SEQ ID NO: 9489

SEQ ID NO: 53010 - DNA, 201 bp, Homo sapiens
ttgttcactgcccaataagcccctgtcttcacagcggagaatccggagcagggaagacagtcaacaccaagagggtcatccagtactttgctgttattgcrgccattggggaccgcagcaagaaggaccagagcccgggcaaggtaggcctgctgccctccaaggtcctgtaccgcagaaagggagggagaagagctctca

SEQ ID NO: 53011 - DNA, 201 bp, Homo sapiens; identical to SEQ ID NO: 13202

SEQ ID NO: 53012 - DNA, 201 bp, Homo sapiens
ctgaaactcttcccctccccatacttctgaagctcttgccaagtggggatatcctagagttaccctcctatttgagtgatgtgcctctccttccctctacstgcaagaatgaggaccttaccccctgaacagcctcccctctgttcctcaccttcaggaacaagacaacctggcagatgctgaggagcgctgtgatcagct

SEQ ID NO: 53013 - DNA, 201 bp, Homo sapiens
cttgcgctccacccatccccactttgtacgttgtatcatccctaatgagacaaagtctccaggtgaggccacaaactcaggccaacccactgctgggcatwcaccgccctgggaacaggacctcctaggacatctccctacctaccaccacagtggtttccaaaccacattcttctcctcccatcccgcatgaggcctccc

SEQ ID NO: 53014 - DNA, 201 bp, Homo sapiens; identical to SEQ ID NO: 13210

SEQ ID NO: 53015 - DNA, 201 bp, Homo sapiens; identical to SEQ ID NO: 13211

SEQ ID NO: 53016 - DNA, 201 bp, Homo sapiens; identical to SEQ ID NO: 13212

SEQ ID NO: 53017 - DNA, 201 bp, Homo sapiens; identical to SEQ ID NO: 13213

SEQ ID NO: 53018 - DNA, 201 bp, Homo sapiens; identical to SEQ ID NO: 13214

SEQ ID NO: 53019 - DNA, 201 bp, Homo sapiens; identical to SEQ ID NO: 13215

SEQ ID NO: 53020 - DNA, 201 bp, Homo sapiens; identical to SEQ ID NO: 13216

SEQ ID NO: 53021 - DNA, 201 bp, Homo sapiens; identical to SEQ ID NO: 13217

SEQ ID NO: 53022 - DNA, 201 bp, Homo sapiens; identical to SEQ ID NO: 13218

SEQ ID NO: 53023 - DNA, 201 bp, Homo sapiens; identical to SEQ ID NO: 13219

SEQ ID NO: 53024 - DNA, 201 bp, Homo sapiens
ctccagtagtattgttcactgcccaataagcccctgtcttcacagcggagaatccggagcagggaagacagtcaacaccaagagggtcatccagtactttrctgttattgcagccattggggaccgcagcaagaaggaccagagcccgggcaaggtaggcctgctgccctccaaggtcctgtaccgcagaaagggagggag

SEQ ID NO: 53025 - DNA, 201 bp, Homo sapiens
gatcaagccgctgctgaagagtgcagaaagagagaaggagatggcctccatgaaggaggagttcacacgcctcaaagaggcgctagagaagtccgaggctsgccgcaaggagctggaggagaagatggtgtccctgctgcaggagaagaatgacctgcagctccaagtgcaggcggtgaggctcctgggctactgttggct

SEQ ID NO: 53026 - DNA, 201 bp, Homo sapiens
agtcaggatgctttgcctcactgggcctggctccttctctctaccagctggaaggatccctggagcaagagaagaaggtgcgcatggacctggagcgagcraagcggaagctggagggcgacctgaagctgacccaggagagcatcatggacctggagaatgacaagcagcagctggatgagcggctgaaaaagtactgtg

SEQ ID NO: 53027 - DNA, 201 bp, Homo sapiens
ctgaagctgacccaggagagcatcatggacctggagaatgacaagcagcagctggatgagcggctgaaaaagtactgtgtcccctccctgctgcccttcckcctccccagcccataacagtacaagcagacccaagacagccatcctctgaggcaacaacctcacgcagcctccacaagtggaggcgcaaaccatgggaaa

SEQ ID NO: 53028 - DNA, 201 bp, Homo sapiens; identical to SEQ ID NO: 9426

SEQ ID NO: 53029 - DNA, 201 bp, Homo sapiens; identical to SEQ ID NO: 13036

SEQ ID NO: 53030 - DNA, 201 bp, Homo sapiens
ttagagccagctgtggaccagacatgggaaggcagtggggactgtgtggtgacagaggcagtcattttctctgtcttcaggggaagccctccttcactgcyttgacatggaggggaccagccacgccctgctgggctcaggcacagtggacgggcacagccccaatggccactcacacccactttctgactgctcccaccc

SEQ ID NO: 53031 - DNA, 201 bp, Homo sapiens
cagaggagaaaaactccatgtataagctgacaggcgccatcatgcactttggaaacatgaagttcaagctgaagcagcgggaggagcaggcggagccagayggcactgaaggtgggaggcagggattcttgggggcagctgtcaagtcatggagggccatgtctgctcagcagtcatctctcttctcttttttcttttttt

SEQ ID NO: 53032 - DNA, 201 bp, Homo sapiens
agagtccaccctggccacctgtacacctgggtggacagagaggggtacacccatgccccatgcccatgcagacctgaggatggtcccattctccttccctytggggaagaatccagaccctccaaagagccctctccttcccaatatcccttctgtcttccctgtgagatcctggttccttctctcttgagcactattgcc

SEQ ID NO: 53033 - DNA, 201 bp, Homo sapiens; identical to SEQ ID NO: 13037

SEQ ID NO: 53034 - DNA, 201 bp, Homo sapiens
acctgcaggaggggctcatatgaacacactgcagtcacagggtcagaggcctcaggaagggtgggagggatgaaggaaatgggatattcccaaggtttcargacctcaggtaggaaggaggcaggaggctcagcactcctttcaatgggcccctgcagagactccctgctggtaatccagtggaacattcgggccttcatg

SEQ ID NO: 53035 - DNA, 201 bp, Homo sapiens; identical to SEQ ID NO: 13038

SEQ ID NO: 53036 - DNA, 201 bp, Homo sapiens
ggattaaggagacaagttttctctccaacttacaagggatctcacttacccatcatacttctttttctggggtccgccaatatggggcctccctacagaaygcttttgatgtgctgggcttcacttcagaggagaaaaactccatgtataagctgacaggcgccatcatgcactttggaaacatgaagttcaagctgaagc

SEQ ID NO: 53037 - DNA, 201 bp, Homo sapiens; identical to SEQ ID NO: 13039

SEQ ID NO: 53038 - DNA, 201 bp, Homo sapiens
acaggggtccaaaagcagagctaagacgctggccattggttgtttaaagtggtatggacctcctgagagccagaatgtgccctgtgatcagggtgtactgrggaatggatgaggtgagacaggactggccagtatctggtgttctatcaaaccaggaagagctgaaagccatgagacagagagacacacaagccaagaaac

SEQ ID NO: 53039 - DNA, 201 bp, Homo sapiens; identical to SEQ ID NO: 13041

SEQ ID NO: 53040 - DNA, 201 bp, Homo sapiens
ctttttctggggtccgccaatatggggcctccctacagaacgcttttgatgtgctgggcttcacttcagaggagaaaaactccatgtataagctgacaggygccatcatgcactttggaaacatgaagttcaagctgaagcagcgggaggagcaggcggagccagacggcactgaaggtgggaggcagggattcttggggg

SEQ ID NO: 53041 - DNA, 201 bp, Homo sapiens
tgagaggatgttcaactggatggtgacgcgcatcaatgccaccctggagaccaagcagccacgccagtacttcataggagtcctggacatcgctggcttcsagatcttcgatgtgagttgggacccctgggagtgggagaacaatcactcactcgctcccacattcaacagctatttgcttagagccagctgtggaccaga

SEQ ID NO: 53042 - DNA, 201 bp, Homo sapiens; identical to SEQ ID NO: 13042

SEQ ID NO: 53043 - DNA, 201 bp, Homo sapiens
gggaaaaggcctcccaggcaagggctttcctcccctagtcccagatatcagggttagttagatggtcctccctggcaaaaagtccattgtatcccatgagwcctttcttcttgttaggcactcagtgggaatgaaaataacagccttcccccttcatacacatctctctttggagaccagttccttgacatggaggaaggc

SEQ ID NO: 53044 - DNA, 201 bp, Homo sapiens; identical to SEQ ID NO: 13043

SEQ ID NO: 53045 - DNA, 201 bp, Homo sapiens
cctgcaagaatgaggaccttaccccctgaacagcctcccctctgttcctcaccttcaggaacaagacaacctggcagatgctgaggagcgctgtgatcagstgatcaaaaacaagattcagctggaggccaaggtgaaggagatgaacgagaggctggaggatgaggaggagatgaatgctgagctcactgccaagaagcg

SEQ ID NO: 53046 - DNA, 201 bp, Homo sapiens
tgttaatccatttttggctaattaggagacagaggctcagggacctgggttcaagacctggctctgttcttgatcagcttagtgaacttgggccagtcccrtaacccctctgggcttaatttactcatctagaacattggatatatctgttctggctaccacctatgataataggtgtgaatcatataaaaaaggaatgtg

SEQ ID NO: 53047 - DNA, 201 bp, Homo sapiens
ctgatgttctcggcccctgggacctgtcctcaggcttctccagctacacttctgaggtttcaaggattgtctttgagaaggttcatgttgtttcctcttgyccccatccacaccctccatcctccccaccctctgccaccctcccctgggcaggaagaagctggcccagcggctgcaggaagctgaggaggccgtggaggc

SEQ ID NO: 53048 - DNA, 201 bp, Homo sapiens
cctgatgttctcggcccctgggacctgtcctcaggcttctccagctacacttctgaggtttcaaggattgtctttgagaaggttcatgttgtttcctcttktccccatccacaccctccatcctccccaccctctgccaccctcccctgggcaggaagaagctggcccagcggctgcaggaagctgaggaggccgtggagg

SEQ ID NO: 53049 - DNA, 201 bp, Homo sapiens
cactttccttccaataaagagcatgtagactgtcaggccctcgcctaaaggaaggctcttcaaactatcttccccaaatcctttaattcccacctctccastggaagagctaaactgacttgctgttccagagaagccgagagccttttagagccggggggattccagtggaggggtccaggcggtgggtctgagcccttt

SEQ ID NO: 53050 - DNA, 201 bp, Homo sapiens
gggtggatgctgaagaacagagccagggagaagcaggaaggtgggactggtcaggttgggcacagcctgccctgacacagcctcttccctctctccaggtyccctgcaggccttggcccctttcctcatctgtagacacacttgagtagcccaggtaagaaaagctgaagctagagcgttgaaaatctagtaagactgggc

SEQ ID NO: 53051 - DNA, 201 bp, Homo sapiens; identical to SEQ ID NO: 13053

SEQ ID NO: 53052 - DNA, 201 bp, Homo sapiens
gaggcaacaacctcacgcagcctccacaagtggaggcgcaaaccatgggaaaaggcctcccaggcaagggctttcctcccctagtcccagatatcagggtyagttagatggtcctccctggcaaaaagtccattgtatcccatgagtcctttcttcttgttaggcactcagtgggaatgaaaataacagccttcccccttc

SEQ ID NO: 53053 - DNA, 201 bp, Homo sapiens
tgggcagagcagatcactgcagagcatgggtgactctggacacttccctcctcaggtatcgcatcctgaacccagcggccatccctgagggacagttcatkgatagcaggaagggggcagagaagctgctcagctccctggacattgatcacaaccagtacaagtttggccacaccaaggtgaggaaaggagactaattaa

SEQ ID NO: 53054 - DNA, 201 bp, Homo sapiens; identical to SEQ ID NO: 13058

SEQ ID NO: 53055 - DNA, 201 bp, Homo sapiens
tggcctccattgatgacgctgaggagctcatggccactgatgtgagtgtgtgaggacccagccagggggtgggaggattggcagtgaggggcaaacagggktccaaaagcagagctaagacgctggccattggttgtttaaagtggtatggacctcctgagagccagaatgtgccctgtgatcagggtgtactggggaatg

SEQ ID NO: 53056 - DNA, 201 bp, Homo sapiens
acaaagctcacccagtacagctcaccagaaagcaaatatgtagccagggtcacccccaaaagacaccaaaaacacacccatcccattcaaacaagcataadaactttttcattgcccagggcagtgtggactctagctttctgaggtgttttctagaatcagactctgaattagaatttgtttcttttccaatccaggatg

SEQ ID NO: 53057 - DNA, 201 bp, Homo sapiens
caaggagagaccaccgtggcctccattgatgacgctgaggagctcatggccactgatgtgagtgtgtgaggacccagccagggggtgggaggattggcagygaggggcaaacaggggtccaaaagcagagctaagacgctggccattggttgtttaaagtggtatggacctcctgagagccagaatgtgccctgtgatcag

SEQ ID NO: 53058 - DNA, 201 bp, Homo sapiens
gttttcctggcctgcattgcagcccaggaaattccatcacactcatagccccaaagtcactcccagcatgtgccgaggtccagagcaggggacttcatccbgcatggggtccccggaccctgaaaaacctgctccctggagcactgcacacacacaattttgtgcataatttcaggagtcccactagttctttggactctt

SEQ ID NO: 53059 - DNA, 201 bp, Homo sapiens
ccagagttattttccagctgaaagcagagagagattatcacattttctaccaaatcctgtctaacaaaaagcctgagctgctgggtgagtcagagccaccractgagaccaactatctccatggcaacctggtcccctctgcttgtggctggactcagctggcatgccctgggtttcatggcactgctggattcaattcag

SEQ ID NO: 53060 - DNA, 201 bp, Homo sapiens
ccaaagaggaaaataagtttcagaaaggttagctgagttacccaaagcaatagtgacaaaattaaagaccatcagagctaaaaaggacctttgaaacaatstagtccgaccccctcattttacattatgagaaaacaaggaccaaagatgggaatgtcctgtagagcccaggccccatcaccctgtctacagcactcctcc

SEQ ID NO: 53061 - DNA, 201 bp, Homo sapiens
gggcctagatatgccatgtctatctgtgcccagagctctgtgtgtgtgtgtgtgtgtgtgtgtgtgtgtgtgtgtgtgtgtgtgtttgtgtttatgtttakaggggggtagggttagaggatgttaacttttctgatatctttctagaaaggagctggggaatgaaaagtcagaggtggtgatcaattctgaattatgtat

SEQ ID NO: 53062 - DNA, 201 bp, Homo sapiens; identical to SEQ ID NO: 13076

SEQ ID NO: 53063 - DNA, 201 bp, Homo sapiens
ggaagggtcttcctgaagggaactgggataggccgggagggagagggagaaggaagggagaagccccacgagagcatcctgtgcagctcctgacctttccyccccaccctctccccacagacagagaaaaccagtccatcctgatcacgtgagtgtagctgctactgtattccctttcagaatctccctgatcccagcctc

SEQ ID NO: 53064 - DNA, 201 bp, Homo sapiens
acccaggctagccactcggcatccagagagcagcatggaccttgacatggagctccccacagatggcaccaagctggtgacctttgaccctaaaggagatrggattcttggtcggcaggtgaaaaacctgacagaggagatggctgggctggatgagatcattgccaagctgaccaaggagaagaaagctctgcaagaggc

SEQ ID NO: 53065 - DNA, 201 bp, Homo sapiens
agacagacctgggtctgaatcccagtgccacgtttgctacttaccttgagcaaacatcttagcctctctgaaccccattgctcctccataaaacacaattwaagtgacacacaattgtgaacatgtgtgagatcatggtgtataaaacactgtgcacctggcacaggtggtcactcaatatgtatatagccctttcccctc

SEQ ID NO: 53066 - DNA, 201 bp, Homo sapiens
tcatagctccagcttccttcaggaaagcaaaacatcttccattggttgccccactcttacctccatttcccccaaacggaacactgtccttcctcctacgwgtcccttttgccattattcccatccttgccgacatcgtgcagtcatgcctctcccttcctcatttcttgcgtccaggctgttagcaaggcattttattcc

SEQ ID NO: 53067 - DNA, 201 bp, Homo sapiens
agaggccctggaagggtcttcctgaagggaactgggataggccgggagggagagggagaaggaagggagaagccccacgagagcatcctgtgcagctcctracctttcctccccaccctctccccacagacagagaaaaccagtccatcctgatcacgtgagtgtagctgctactgtattccctttcagaatctccctgat

SEQ ID NO: 53068 - DNA, 201 bp, Homo sapiens; identical to SEQ ID NO: 13080

SEQ ID NO: 53069 - DNA, 201 bp, Homo sapiens
aaatcgaggacatggccatgctgaccttcctgcatgagcccgcggtgctctacaacctcaaggatcgctacggctcctggatgatctacgtgagtgctgcmcctggccctacgttgggatctctgttcttgctccatccatgtccaccccaggagccaagagtgtcttctgtttgtgtctaggcagggttacactctaacc

SEQ ID NO: 53070 - DNA, 201 bp, Homo sapiens; identical to SEQ ID NO: 13081

SEQ ID NO: 53071 - DNA, 201 bp, Homo sapiens
agaagaccctaatttatatacaaccagtatatcccagtttccccccaactgctagtttccagttcccttccacctaattttgtcctgcaatcttgtaactmaaacctaaaatggacatcccagagaacccgggcctggctttgttctcgcccaggcaacttccctctgaccaaccccagaaccctaccctccagaacttgc

SEQ ID NO: 53072 - DNA, 201 bp, Homo sapiens
tgcagggcacggggtgcagggagctgagctccaggcttttggtccctgttctcatcccccgctttgtcgttttgttcactgtcccatccccagagcctagracagagcctggcacatagtaggcattcagtgaagatttgtggagtgaatgaatgaccagtcactgaactctcttcacataaacattttacccattgcatc

SEQ ID NO: 53073 - DNA, 201 bp, Homo sapiens
gtcagccctggaggaggccgaggtgtgtgtgtgtgcagggcacggggtgcagggagctgagctccaggcttttggtccctgttctcatcccccgctttgtygttttgttcactgtcccatccccagagcctaggacagagcctggcacatagtaggcattcagtgaagatttgtggagtgaatgaatgaccagtcactgaa

SEQ ID NO: 53074 - DNA, 201 bp, Homo sapiens
aggccgagaagatggagctgcagtcagccctggaggaggccgaggtgtgtgtgtgtgcagggcacggggtgcagggagctgagctccaggcttttggtccstgttctcatcccccgctttgtcgttttgttcactgtcccatccccagagcctaggacagagcctggcacatagtaggcattcagtgaagatttgtggagt

SEQ ID NO: 53075 - DNA, 201 bp, Homo sapiens
gcctgaagcccacttctccctgatccactatgccggcatcgtggactacaacatcattggctggctgcagaagaacaaggatcctctcaatgagactgtcrtgggcttgtatcagaagtcttccctcaagctgctcagcaccctgtttgccaactatgctggggctgatgcgcgtaagtagggactgaggctcccggtaca

SEQ ID NO: 53076 - DNA, 201 bp, Homo sapiens
gctatgtgatgggtgtgtctgtgagaggaagcccacagtgtcttctctctgagaatgtccacaaagtctgacaacaaaatggggacaggatggaaaagaastctctttagagtcatcagacttgcattcaagtcttggctctcccacttgttgtcatgggctcttggccaagcaagccatttaacctcgatttcctcatct

SEQ ID NO: 53077 - DNA, 201 bp, Homo sapiens
cagaagtatgaggagtcgcagtcggagctggagtcctcgcagaaggaggctcgctccctcagcacagagctcttcaaactcaagaacgcctatgaggagtscctggaacatctggagaccttcaagcgggagaacaaaaacctgcagggtgtgctgggggcccaagaggctggggaggggctgcactggcagtgttcccat

SEQ ID NO: 53078 - DNA, 201 bp, Homo sapiens
agatcctggccgagtggaagcagaagtatgaggagtcgcagtcggagctggagtcctcgcagaaggaggctcgctccctcagcacagagctcttcaaactyaagaacgcctatgaggagtccctggaacatctggagaccttcaagcgggagaacaaaaacctgcagggtgtgctgggggcccaagaggctggggaggggc

SEQ ID NO: 53079 - DNA, 201 bp, Homo sapiens
aggctccacatgagagcctcttaggaaagtccctttgtggcttttcacagagagcccacagggcaccaagaaatgccctcacattcaagaagtcaggggawcagggccatttctttgttttgcttaacttgtggttccaattcttagtgtaagttcttccaaaatgtatagactttccagacttggtaaacagtgagcttg

SEQ ID NO: 53080 - DNA, 201 bp, Homo sapiens
aaggctccacatgagagcctcttaggaaagtccctttgtggcttttcacagagagcccacagggcaccaagaaatgccctcacattcaagaagtcaggggwtcagggccatttctttgttttgcttaacttgtggttccaattcttagtgtaagttcttccaaaatgtatagactttccagacttggtaaacagtgagctt

SEQ ID NO: 53081 - DNA, 201 bp, Homo sapiens; identical to SEQ ID NO: 9484

SEQ ID NO: 53082 - DNA, 201 bp, Homo sapiens
aagtggctgccggtgtacactcctgaggtggtggctgcctaccggggcaagaagaggagcgaggccccgccccacatcttctccatctccgacaacgcctrtcagtacatgctgacaggtgagaggccctggaagggtcttcctgaagggaactgggataggccgggagggagagggagaaggaagggagaagccccacga

SEQ ID NO: 53083 - DNA, 201 bp, Homo sapiens
ggtccctgaccttggccttgggacttggactggtggaggaatggtctcagatatgagccttcccccaactcatcaccactctcttccatctctccaggggmaattcattcgaattcattttggggcaacaggaaagttggcatctgcagacatagagacctgtgagtgccatgaatctgctaggctcagcctaagctcacc

SEQ ID NO: 53084 - DNA, 201 bp, Homo sapiens
cttggccttgggacttggactggtggaggaatggtctcagatatgagccttcccccaactcatcaccactctcttccatctctccaggggaaattcattcraattcattttggggcaacaggaaagttggcatctgcagacatagagacctgtgagtgccatgaatctgctaggctcagcctaagctcacccttgctctag

SEQ ID NO: 53085 - DNA, 201 bp, Homo sapiens
tcaccttcaggaacaagacaacctggcagatgctgaggagcgctgtgatcagctgatcaaaaacaagattcagctggaggccaaggtgaaggagatgaacragaggctggaggatgaggaggagatgaatgctgagctcactgccaagaagcgcaagctggaagatgagtgctcagagctcaaaagggacatcgatgatct

SEQ ID NO: 53086 - DNA, 201 bp, Homo sapiens; identical to SEQ ID NO: 13095

SEQ ID NO: 53087 - DNA, 201 bp, Homo sapiens
ggaggccaaggtgaaggagatgaacgagaggctggaggatgaggaggagatgaatgctgagctcactgccaagaagcgcaagctggaagatgagtgctcaragctcaaaagggacatcgatgatctggagctgacactggccaaagtggagaaggagaaacacgcaacagagaacaaggtaagggcagctccctttggctc

SEQ ID NO: 53088 - DNA, 201 bp, Homo sapiens; identical to SEQ ID NO: 13096

SEQ ID NO: 53089 - DNA, 201 bp, Homo sapiens; identical to SEQ ID NO: 13097

SEQ ID NO: 53090 - DNA, 201 bp, Homo sapiens; identical to SEQ ID NO: 13098

SEQ ID NO: 53091 - DNA, 201 bp, Homo sapiens; identical to SEQ ID NO: 13101

SEQ ID NO: 53092 - DNA, 201 bp, Homo sapiens; identical to SEQ ID NO: 13102

SEQ ID NO: 53093 - DNA, 201 bp, Homo sapiens; identical to SEQ ID NO: 13103

SEQ ID NO: 53094 - DNA, 201 bp, Homo sapiens
tctttccctcgtacccctccctagtcatggccaacacacaccttgcctgcaggtgttcttcaaggccgggctgctggggctgctggaggaaatgagggackagaggctgagccgcatcatcacgcgtatccaggcccagtcccgaggtgtgctcgccagaatggagtacaaaaagctgctggaacgtaggtgagagatctc

SEQ ID NO: 53095 - DNA, 201 bp, Homo sapiens
cttctgctcactccaggcacagccatgggagattcggagatggcagtctttggggctgccgccccctacctgcgcaagtcagagaaggagcggctagaagygcagaccaggccttttgacctcaagaaggatgtcttcgtgcctgatgacaaacaggagtttgtcaaggccaagatcgtgtctcgagagggtggcaaagtc

SEQ ID NO: 53096 - DNA, 201 bp, Homo sapiens; identical to SEQ ID NO: 13109

SEQ ID NO: 53097 - DNA, 201 bp, Homo sapiens
cacgagcaagtatattgaccatagagcagaatccatgtccacctgtgtgaaggacactcagtgatgctctctcctgcttcctcagcccatgggcatcatgyccatcctggaagaggagtgcatgttccccaaggccaccgacatgaccttcaaggccaagctgtttgacaaccacctgggcaaatccgccaacttccagaa

SEQ ID NO: 53098 - DNA, 201 bp, Homo sapiens
ggtgatggacaaccccctggtcatgcaccagctgcgctgcaatggtgtgctggagggcatccgcatctgcaggaaaggcttccccaaccgcatcctctacrgggacttccggcagaggtgggtatgagggtgcaccagagctcatagaacagggggagccaggctgccctgatgggaatgggatctgcaggtgaccctgga

SEQ ID NO: 53099 - DNA, 201 bp, Homo sapiens
ccctgctgcccttcctcctccccagcccataacagtacaagcagacccaagacagccatcctctgaggcaacaacctcacgcagcctccacaagtggaggygcaaaccatgggaaaaggcctcccaggcaagggctttcctcccctagtcccagatatcagggttagttagatggtcctccctggcaaaaagtccattgta

SEQ ID NO: 53100 - DNA, 201 bp, Homo sapiens
tatccatgattagtgagcaggcccccaccctgccctgtgccctgactgtctgcctgcatcccctcccccaaccccttcccaggcctccctggagcacgagragggcaagatcctccgggcccagctggagttcaaccagatcaaggcagagatcgagcggaagctggcagagaaggacgaggagatggaacaggccaagcg

SEQ ID NO: 53101 - DNA, 201 bp, Homo sapiens
gaatgacaagcagcagctggatgagcggctgaaaaagtactgtgtcccctccctgctgcccttcctcctccccagcccataacagtacaagcagacccaakacagccatcctctgaggcaacaacctcacgcagcctccacaagtggaggcgcaaaccatgggaaaaggcctcccaggcaagggctttcctcccctagtcc

SEQ ID NO: 53102 - DNA, 201 bp, Homo sapiens; identical to SEQ ID NO: 9511

SEQ ID NO: 53103 - DNA, 201 bp, Homo sapiens; identical to SEQ ID NO: 13121

SEQ ID NO: 53104 - DNA, 201 bp, Homo sapiens
gctgttacccttcctaaggtaatccccaccatctctttccctcgtacccctccctagtcatggccaacacacaccttgcctgcaggtgttcttcaaggccrggctgctggggctgctggaggaaatgagggacgagaggctgagccgcatcatcacgcgtatccaggcccagtcccgaggtgtgctcgccagaatggagta

SEQ ID NO: 53105 - DNA, 201 bp, Homo sapiens
ccttttctaggctgttacccttcctaaggtaatccccaccatctctttccctcgtacccctccctagtcatggccaacacacaccttgcctgcaggtgttsttcaaggccgggctgctggggctgctggaggaaatgagggacgagaggctgagccgcatcatcacgcgtatccaggcccagtcccgaggtgtgctcgcca

SEQ ID NO: 53106 - DNA, 201 bp, Homo sapiens
tagatgagggtcagagatggaaatagttagatttctgctcctacagggagctcagaatgctcttccttcccctaggagagccccagcttgaacaatagttwgttgttccttttaccctggcaggtttgctaggctgctcctctggttaaggggtaacctcaaagaggaagggactcactggtaactcctcttgactcttga

SEQ ID NO: 53107 - DNA, 201 bp, Homo sapiens
aaaatggggacaggatggaaaagaagtctctttagagtcatcagacttgcattcaagtcttggctctcccacttgttgtcatgggctcttggccaagcaasccatttaacctcgatttcctcatctgtcaaatggggtgaagactgagtaggagaaagtgcattgaagtgcttttagactggaaagtgccgaacaaatgtg

SEQ ID NO: 53108 - DNA, 201 bp, Homo sapiens
ccacagtgtcttctctctgagaatgtccacaaagtctgacaacaaaatggggacaggatggaaaagaagtctctttagagtcatcagacttgcattcaagycttggctctcccacttgttgtcatgggctcttggccaagcaagccatttaacctcgatttcctcatctgtcaaatggggtgaagactgagtaggagaaag

SEQ ID NO: 53109 - DNA, 201 bp, Homo sapiens
ggcatgtgctaccatgtctagctaatttttatattttagtagagatgcggtttcaccatgttggccaggctggtcttgaactcctgaccttgtgatccacycgcctcagcctcccaaagtacgggattacaggcgtgagccaccactcccagctcagctctaagtttcagtggttctgggaatttcagccttagggagggg

SEQ ID NO: 53110 - DNA, 201 bp, Homo sapiens; identical to SEQ ID NO: 13137

SEQ ID NO: 53111 - DNA, 201 bp, Homo sapiens
cctcagcctcccaagtagctgggattataggcatgtgctaccatgtctagctaatttttatattttagtagagatgcggtttcaccatgttggccaggctrgtcttgaactcctgaccttgtgatccactcgcctcagcctcccaaagtacgggattacaggcgtgagccaccactcccagctcagctctaagtttcagtg

SEQ ID NO: 53112 - DNA, 201 bp, Homo sapiens
caatatcaaggggaagcctgaagcccacttctccctgatccactatgccggcatcgtggactacaacatcattggctggctgcagaagaacaaggatcctstcaatgagactgtcgtgggcttgtatcagaagtcttccctcaagctgctcagcaccctgtttgccaactatgctggggctgatgcgcgtaagtagggact

SEQ ID NO: 53113 - DNA, 201 bp, Homo sapiens
gctccttttctatccccagacctactcgggcctcttctgtgtcaccgtcaacccttacaagtggctgccggtgtacactcctgaggtggtggctgcctacyggggcaagaagaggagcgaggccccgccccacatcttctccatctccgacaacgcctatcagtacatgctgacaggtgagaggccctggaagggtcttcc

SEQ ID NO: 53114 - DNA, 201 bp, Homo sapiens
atcaagccgctgctgaagagtgcagaaagagagaaggagatggcctccatgaaggaggagttcacacgcctcaaagaggcgctagagaagtccgaggctcrccgcaaggagctggaggagaagatggtgtccctgctgcaggagaagaatgacctgcagctccaagtgcaggcggtgaggctcctgggctactgttggctc

SEQ ID NO: 53115 - DNA, 201 bp, Homo sapiens
tgccggcatcgtggactacaacatcattggctggctgcagaagaacaaggatcctctcaatgagactgtcgtgggcttgtatcagaagtcttccctcaagytgctcagcaccctgtttgccaactatgctggggctgatgcgcgtaagtagggactgaggctcccggtacagaggagcagggattctgccaaggttctgag

SEQ ID NO: 53116 - DNA, 201 bp, Homo sapiens; identical to SEQ ID NO: 13162

SEQ ID NO: 53117 - DNA, 201 bp, Homo sapiens
gcctctgcagggcaccctggaggaccagatcatccaggccaaccctgctctggaggcctttggcaatgccaagaccgtccggaacgacaactcctcccgcytcgtgagtggtccctgaccttggccttgggacttggactggtggaggaatggtctcagatatgagccttcccccaactcatcaccactctcttccatctc

SEQ ID NO: 53118 - DNA, 201 bp, Homo sapiens
atgccggcatcgtggactacaacatcattggctggctgcagaagaacaaggatcctctcaatgagactgtcgtgggcttgtatcagaagtcttccctcaasctgctcagcaccctgtttgccaactatgctggggctgatgcgcgtaagtagggactgaggctcccggtacagaggagcagggattctgccaaggttctga

SEQ ID NO: 53119 - DNA, 201 bp, Homo sapiens; identical to SEQ ID NO: 9465

SEQ ID NO: 53120 - DNA, 201 bp, Homo sapiens
tacagaacgcttttgatgtgctgggcttcacttcagaggagaaaaactccatgtataagctgacaggcgccatcatgcactttggaaacatgaagttcaarctgaagcagcgggaggagcaggcggagccagacggcactgaaggtgggaggcagggattcttgggggcagctgtcaagtcatggagggccatgtctgctc

SEQ ID NO: 53121 - DNA, 201 bp, Homo sapiens; identical to SEQ ID NO: 13179

SEQ ID NO: 53122 - DNA, 201 bp, Homo sapiens; identical to SEQ ID NO: 13181

SEQ ID NO: 53123 - DNA, 201 bp, Homo sapiens
ttgtgatccactcgcctcagcctcccaaagtacgggattacaggcgtgagccaccactcccagctcagctctaagtttcagtggttctgggaatttcagcsttagggaggggtgccaccctagaagaccctaatttatatacaaccagtatatcccagtttccccccaactgctagtttccagttcccttccacctaattt

SEQ ID NO: 53124 - DNA, 201 bp, Homo sapiens
tcttacctgtatgctacccctcccagtggaacatctagcaccactcccctcatcccagctccagctgccattgacctcctccctgcaatccttttctaggmtgttacccttcctaaggtaatccccaccatctctttccctcgtacccctccctagtcatggccaacacacaccttgcctgcaggtgttcttcaaggccgg

SEQ ID NO: 53125 - DNA, 201 bp, Homo sapiens
ttgtgctgagcacccaggacagggtggcaccagggacagctgatttcccaggggcttgaaagtggacacatggaggatgggcacctgcatgatgacctccyacacctgcatgtttattgggcctggtttatgcatccaaggatcaggaagtgtgagggtggtgtaggggatcataagagtgcacctattttcaaccctagc

SEQ ID NO: 53126 - DNA, 201 bp, Homo sapiens
gccagaatgtgccctgtgatcagggtgtactggggaatggatgaggtgagacaggactggccagtatctggtgttctatcaaaccaggaagagctgaaagscatgagacagagagacacacaagccaagaaacaagcatcaccgagggagcaggacgaggagggaaggccatgcagacggcatggggctggaggggctgtt

SEQ ID NO: 53127 - DNA, 201 bp, Homo sapiens
aatctgaacaagctgatgaccaacttgcgctccacccatccccactttgtacgttgtatcatccctaatgagacaaagtctccaggtgaggccacaaactmaggccaacccactgctgggcatacaccgccctgggaacaggacctcctaggacatctccctacctaccaccacagtggtttccaaaccacattcttctcc

SEQ ID NO: 53128 - DNA, 201 bp, Homo sapiens
agccagaatgtgccctgtgatcagggtgtactggggaatggatgaggtgagacaggactggccagtatctggtgttctatcaaaccaggaagagctgaaasccatgagacagagagacacacaagccaagaaacaagcatcaccgagggagcaggacgaggagggaaggccatgcagacggcatggggctggaggggctgt

SEQ ID NO: 53129 - DNA, 201 bp, Homo sapiens
tttcacaccaaatcgtgcagtggttgcctagacacggagccagtcaagcttgcatgccccgttgctagaagagcatggcatcggttgtgttctgtgctcgyaggctgggccccagctccctttcctcccctcctttgtggctgttcctcaggcctgcagaggggaagatttttcctgtcctgttactctgcctcacttgcc

SEQ ID NO: 53130 - DNA, 201 bp, Homo sapiens; identical to SEQ ID NO: 13194

SEQ ID NO: 53131 - DNA, 201 bp, Homo sapiens
caactttgctacttgccttttccttccagaggctgacaagtctgcctacctcatggggctgaactcagccgacctgctcaaggggctgtgccaccctcggktgaaagtgggcaatgagtacgtcaccaaggggcagaatgtccagcaggtgggtccatcttcagatgataatgggtgggcagggtagggagactggcatgg

SEQ ID NO: 53132 - DNA, 201 bp, Homo sapiens
ctgtcttcacagcggagaatccggagcagggaagacagtcaacaccaagagggtcatccagtactttgctgttattgcagccattggggaccgcagcaagmaggaccagagcccgggcaaggtaggcctgctgccctccaaggtcctgtaccgcagaaagggagggagaagagctctcacctgcctccttcttggcctctg

SEQ ID NO: 53133 - DNA, 201 bp, Homo sapiens
ggagaatccggagcagggaagacagtcaacaccaagagggtcatccagtactttgctgttattgcagccattggggaccgcagcaagaaggaccagagccygggcaaggtaggcctgctgccctccaaggtcctgtaccgcagaaagggagggagaagagctctcacctgcctccttcttggcctctgcagggcaccctgg

SEQ ID NO: 53134 - DNA, 201 bp, Homo sapiens
cggctgcaggacctggtagacaagctgcagctaaaggtcaaggcctacaagcgccaggccgaggaggcggtgagtgaccctgctggggactaggcccaggrgaggcataggagagctcgtcccccaagccaggagtctgagaacccaggccccctctcacctcatgctcccacctcccgcaggaggagcaagccaacacca

SEQ ID NO: 53135 - DNA, 201 bp, Homo sapiens
aggagctcatggccactgatgtgagtgtgtgaggacccagccagggggtgggaggattggcagtgaggggcaaacaggggtccaaaagcagagctaagackctggccattggttgtttaaagtggtatggacctcctgagagccagaatgtgccctgtgatcagggtgtactggggaatggatgaggtgagacaggactgg

SEQ ID NO: 53136 - DNA, 201 bp, Homo sapiens
gtgtgattgatttcccaaatgcagaaaagactacccaagtccccagccaaggaaggaggctggcctgtggtgaagacactggctttgaaatggctcaactwcgtcccaagcaccctttgtgcatcttaattgccctgggaaatcagggaggggtggcagtttggagcttggaaagctggaaggtggggacgaaaggagttt

SEQ ID NO: 53137 - DNA, 201 bp, Homo sapiens
agtgtgattgatttcccaaatgcagaaaagactacccaagtccccagccaaggaaggaggctggcctgtggtgaagacactggctttgaaatggctcaacwacgtcccaagcaccctttgtgcatcttaattgccctgggaaatcagggaggggtggcagtttggagcttggaaagctggaaggtggggacgaaaggagtt

SEQ ID NO: 53138 - DNA, 201 bp, Homo sapiens; identical to SEQ ID NO: 9491

SEQ ID NO: 53139 - DNA, 201 bp, Homo sapiens
ggagcagacagagcggtcccggaagctggcggagcaggagctgattgagactagtgagcgggtgcagctgctgcattcccaggtgagcagctcccctgctsattcctgaagggagcacaggctggggctcagcaagcaaggcttgagagctatgcatagatgctcaatgcttttcctgctctgcccaaccctcccccaacc

SEQ ID NO: 53140 - DNA, 201 bp, Homo sapiens
gcttcccatttccacatacctcccggttcccacctctgcctccctctgttttcttttatactctatacctgattgcctctgtttccttggcaacacttttytcttcattttcctccttgtcttcatagctggctctcccctgtgagggcctgaatcactttctcttaggcttatttttattttctcttagattctcttttc

SEQ ID NO: 53141 - DNA, 201 bp, Homo sapiens
gcacagtccatgccataacaatgacgaccacttccaattgtttcctagctggagaggcggggaggggagcactgtttgggaagggggggagcctgggggaratgcttctagtgacaacagccctttctaaatccggctagggactgggtgccgttgggggtgggggtgccctgctgccccatatatacagcccctgagacc

SEQ ID NO: 53142 - DNA, 201 bp, Homo sapiens
atgagccttcccccaactcatcaccactctcttccatctctccaggggaaattcattcgaattcattttggggcaacaggaaagttggcatctgcagacayagagacctgtgagtgccatgaatctgctaggctcagcctaagctcacccttgctctagaccatctggtcttgacctctctctctctcccctccctccctc

SEQ ID NO: 53143 - DNA, 201 bp, Homo sapiens
ccatcatacttctttttctggggtccgccaatatggggcctccctacagaacgcttttgatgtgctgggcttcacttcagaggagaaaaactccatgtatragctgacaggcgccatcatgcactttggaaacatgaagttcaagctgaagcagcgggaggagcaggcggagccagacggcactgaaggtgggaggcaggg

SEQ ID NO: 53144 - DNA, 201 bp, Homo sapiens
tcacttcagaggagaaaaactccatgtataagctgacaggcgccatcatgcactttggaaacatgaagttcaagctgaagcagcgggaggagcaggcggarccagacggcactgaaggtgggaggcagggattcttgggggcagctgtcaagtcatggagggccatgtctgctcagcagtcatctctcttctcttttttct

SEQ ID NO: 53145 - DNA, 201 bp, Homo sapiens
cctcccggttcccacctctgcctccctctgttttcttttatactctatacctgattgcctctgtttccttggcaacacttttctcttcattttcctccttrtcttcatagctggctctcccctgtgagggcctgaatcactttctcttaggcttatttttattttctcttagattctcttttcctccaccttctgcttctt

SEQ ID NO: 53146 - DNA, 201 bp, Homo sapiens
ccttccttcttctcctctcttcttcctgcatctctttctggcattttctttacttttctctattgcatttttggccacaggaaaatctgaacaagctgatraccaacttgcgctccacccatccccactttgtacgttgtatcatccctaatgagacaaagtctccaggtgaggccacaaactcaggccaacccactgctg

SEQ ID NO: 53147 - DNA, 201 bp, Homo sapiens
cccatccccagagcctaggacagagcctggcacatagtaggcattcagtgaagatttgtggagtgaatgaatgaccagtcactgaactctcttcacataarcattttacccattgcatcttagctgagcttcccatttccacatacctcccggttcccacctctgcctccctctgttttcttttatactctatacctgatt

SEQ ID NO: 53148 - DNA, 201 bp, Homo sapiens
caatccttttctaggctgttacccttcctaaggtaatccccaccatctctttccctcgtacccctccctagtcatggccaacacacaccttgcctgcaggkgttcttcaaggccgggctgctggggctgctggaggaaatgagggacgagaggctgagccgcatcatcacgcgtatccaggcccagtcccgaggtgtgctc

SEQ ID NO: 53149 - DNA, 201 bp, Homo sapiens
tcccatccccagagcctaggacagagcctggcacatagtaggcattcagtgaagatttgtggagtgaatgaatgaccagtcactgaactctcttcacataracattttacccattgcatcttagctgagcttcccatttccacatacctcccggttcccacctctgcctccctctgttttcttttatactctatacctgat

SEQ ID NO: 53150 - DNA, 201 bp, Homo sapiens; identical to SEQ ID NO: 9505

SEQ ID NO: 53151 - DNA, 201 bp, Homo sapiens
tccatgagctggagaaggtccgaaagcagctggaggccgagaagatggagctgcagtcagccctggaggaggccgaggtgtgtgtgtgtgcagggcacggkgtgcagggagctgagctccaggcttttggtccctgttctcatcccccgctttgtcgttttgttcactgtcccatccccagagcctaggacagagcctggc

SEQ ID NO: 53152 - DNA, 201 bp, Homo sapiens
agttcaacagctttgagcagctctgcatcaacttcaccaacgagaagctgcagcagttcttcaaccaccacatgtttgtgctggagcaggaggagtacaasaaggagggcatcgagtggacattcattgactttggcatggacctgcaggcctgcattgacctcatcgagaaggtgcctctttggccttaccacctgaatt

SEQ ID NO: 53153 - DNA, 201 bp, Homo sapiens
cactgatctcccagctgacccgaggcaagctcacctacacccagcagctggaggacctcaagaggcagctggaggaggaggttaaggtaagggctagactygggccacctggcccaagcaaggagcacactgactagccttgcatcaaatcacttcccttcccagcaataaggctggctgtggaccaacagttctccaaga

SEQ ID NO: 53154 - DNA, 201 bp, Homo sapiens
tccccaccctctgccaccctcccctgggcaggaagaagctggcccagcggctgcaggaagctgaggaggccgtggaggctgttaatgccaagtgctcctcrctggagaagaccaagcaccggctacagaatgagatcgaggacttgatggtggacgtagagcgctccaatgctgctgctgcagccctggacaagaagcaga

SEQ ID NO: 53155 - DNA, 201 bp, Homo sapiens
tagagcgctccaatgctgctgctgcagccctggacaagaagcagaggaacttcgacaaggtgggccctgggtgggggccgcagccagcatgcagggcaagrgggcatgaggggttcagtgagaggccagagccatcctccttggaggtgggggaggagggctgagcccaggcaggtcctgagacagaccctggacatgggg

SEQ ID NO: 53156 - DNA, 201 bp, Homo sapiens
tatgaggagtccctggaacatctggagaccttcaagcgggagaacaaaaacctgcagggtgtgctgggggcccaagaggctggggaggggctgcactggcmgtgttcccatatggtgccacccaagggctccaagaggcgtctgggcaaagaggcgtgtccctccaactccactggacctcagcagccctcaaccgagtta

SEQ ID NO: 53157 - DNA, 201 bp, Homo sapiens
ggatgccatttctacaaacagttgactaaagcagtccagagcagggatctttctttgggtcattgttatgtccttattgaccagaataatgcctggcacayagtaggcactcaataaatacttgttgaatggaggaatctgcaaagctgctcagtcttcagacagcagcaagcagcaggaagagaatcatgatgtaaccaa

SEQ ID NO: 53158 - DNA, 201 bp, Homo sapiens
ccgagcagatcgccctcaagggcggcaagaagcagctgcagaagctggaagcgcgggtgcgggagctggagaatgagctggaggccgagcagaagcgcaaygcagagtcggtgaagggcatgaggaagagcgagcggcgcatcaaggagctcacctaccaggtgcgacgggcggtgactccaggcagagccctggcaccat

SEQ ID NO: 53159 - DNA, 201 bp, Homo sapiens; identical to SEQ ID NO: 20112

SEQ ID NO: 53160 - DNA, 201 bp, Homo sapiens; identical to SEQ ID NO: 20113

SEQ ID NO: 53161 - DNA, 201 bp, Homo sapiens; identical to SEQ ID NO: 20114

SEQ ID NO: 53162 - DNA, 201 bp, Homo sapiens; identical to SEQ ID NO: 20115

SEQ ID NO: 53163 - DNA, 201 bp, Homo sapiens; identical to SEQ ID NO: 9671

SEQ ID NO: 53164 - DNA, 201 bp, Homo sapiens; identical to SEQ ID NO: 20118

SEQ ID NO: 53165 - DNA, 201 bp, Homo sapiens; identical to SEQ ID NO: 20119

SEQ ID NO: 53166 - DNA, 201 bp, Homo sapiens; identical to SEQ ID NO: 20121

SEQ ID NO: 53167 - DNA, 201 bp, Homo sapiens; identical to SEQ ID NO: 20120

SEQ ID NO: 53168 - DNA, 201 bp, Homo sapiens
gaaggtgggcggtcacttacatccgtgatggccttcttggccttctcctcggcgtttctgcactcctgcactgcctcctccacttccgactggagctgggwcagatccgactccatcttcttcttctggttgatgaggctggtgttctagacatggagagagaaaaatgatcaaatatatactacactttgttacctgatt

SEQ ID NO: 53169 - DNA, 201 bp, Homo sapiens
aagaacgttaaatctaccaacagcatctcaaggaggaggtgagaggagccctgtgagggcggggcagtggggccagagaagaaacttccacatctactccyggtgtctggcgtccgccgcacctggtaggtgagctccttgatgcgccgctcgctcttcctcatgcccttcaccgactctgcgttgcgcttctgctcggcc

SEQ ID NO: 53170 - DNA, 201 bp, Homo sapiens
cctcccctgactcttatccccacagtcgaaggtggaaggattctttgaactgttctgaagtcttcatggtagcacttagagttattaaaaaaaaaaaaaaagaaagaaagaaacctggggaaagactagttagaagagttttcaggaagtagaagtagattcttcatttgctggaaaaactcatagactcaagtcaaactg

SEQ ID NO: 53171 - DNA, 201 bp, Homo sapiens; identical to SEQ ID NO: 20126

SEQ ID NO: 53172 - DNA, 201 bp, Homo sapiens; identical to SEQ ID NO: 20127

SEQ ID NO: 53173 - DNA, 201 bp, Homo sapiens; identical to SEQ ID NO: 20128

SEQ ID NO: 53174 - DNA, 201 bp, Homo sapiens; identical to SEQ ID NO: 20129

SEQ ID NO: 53175 - DNA, 201 bp, Homo sapiens; identical to SEQ ID NO: 20130

SEQ ID NO: 53176 - DNA, 201 bp, Homo sapiens; identical to SEQ ID NO: 20132

SEQ ID NO: 53177 - DNA, 201 bp, Homo sapiens
tgccatttctacttctgtccacaaatcactctgtggttctgtatctgtaacctctttcttgtgcctctggtatccatctatcaaatggactgacaccctcrtctccttggccttttcttcccaggtacactgaaaataacgggccaagggcacagctctcagctatgcaagtggaggttttagagcattctagggtcctct

SEQ ID NO: 53178 - DNA, 201 bp, Homo sapiens; identical to SEQ ID NO: 2632

SEQ ID NO: 53179 - DNA, 201 bp, Homo sapiens; identical to SEQ ID NO: 2633

SEQ ID NO: 53180 - DNA, 201 bp, Homo sapiens; identical to SEQ ID NO: 20136

SEQ ID NO: 53181 - DNA, 201 bp, Homo sapiens; identical to SEQ ID NO: 20137

SEQ ID NO: 53182 - DNA, 201 bp, Homo sapiens; identical to SEQ ID NO: 20138

SEQ ID NO: 53183 - DNA, 201 bp, Homo sapiens; identical to SEQ ID NO: 20139

SEQ ID NO: 53184 - DNA, 201 bp, Homo sapiens; identical to SEQ ID NO: 20140

SEQ ID NO: 53185 - DNA, 201 bp, Homo sapiens
cttggcaccaatgtcacggctcttggctcgaagcttgttgacctgggactcagcgatgtccgcccgctcctctgcctcatccagctcatgctgcaccttgyggaacttggacaggttggtgttggcttgctcctcctgtggtgggacagtggggatgggtgaatgagctggagatgggctatgggattctcagcctctcaa

SEQ ID NO: 53186 - DNA, 201 bp, Homo sapiens; identical to SEQ ID NO: 20141

SEQ ID NO: 53187 - DNA, 201 bp, Homo sapiens; identical to SEQ ID NO: 20142

SEQ ID NO: 53188 - DNA, 201 bp, Homo sapiens; identical to SEQ ID NO: 20143

SEQ ID NO: 53189 - DNA, 201 bp, Homo sapiens
cagtggcctggcctggacccaaggccttgtttctgtctttaggggaggcggaaggtgggcggtcacttacatccgtgatggccttcttggccttctcctcrgcgtttctgcactcctgcactgcctcctccacttccgactggagctgggtcagatccgactccatcttcttcttctggttgatgaggctggtgttctaga

SEQ ID NO: 53190 - DNA, 201 bp, Homo sapiens; identical to SEQ ID NO: 20149

SEQ ID NO: 53191 - DNA, 201 bp, Homo sapiens
tagacatggagagagaaaaatgatcaaatatatactacactttgttacctgatttcataccctttctccagaaagaattaaaggtggtcattttttttttwaaacaacaagcccacttttagactattgatcgttttgtacctgctttcccttttcctatgaaagtgcatacattctagacattgtatctaagattactaa

SEQ ID NO: 53192 - DNA, 201 bp, Homo sapiens
cttcttctggttgatgaggctggtgttctagacatggagagagaaaaatgatcaaatatatactacactttgttacctgatttcataccctttctccagaragaattaaaggtggtcattttttttttaaaacaacaagcccacttttagactattgatcgttttgtacctgctttcccttttcctatgaaagtgcataca

SEQ ID NO: 53193 - DNA, 201 bp, Homo sapiens; identical to SEQ ID NO: 20150

SEQ ID NO: 53194 - DNA, 201 bp, Homo sapiens
aagctggtttggagggggagcaaatgcaatcacctttccctcctccatcattttactcttctccccttgcctttgctgcccctccctgcaatgatccaggkcaaagaggtggtggggaagattctctgactctatcgtaggtcaaaggggcaatgcaaggttgtcagtcagggatccacagagcaatgaaggctgaagtca

SEQ ID NO: 53195 - DNA, 201 bp, Homo sapiens
acagtggggatgggtgaatgagctggagatgggctatgggattctcagcctctcaacctgaggttccagctccctgtccctgaggcacccatgcctcatgmatattcctgcaacagccttcccaagggtatcctgcaactgccttgcactcttctcaaacatgtccagcactcagagtccttcacggccatccactgcccc

SEQ ID NO: 53196 - DNA, 201 bp, Homo sapiens; identical to SEQ ID NO: 2630

SEQ ID NO: 53197 - DNA, 201 bp, Homo sapiens; identical to SEQ ID NO: 20152

SEQ ID NO: 53198 - DNA, 201 bp, Homo sapiens; identical to SEQ ID NO: 20153

SEQ ID NO: 53199 - DNA, 201 bp, Homo sapiens
gtggtgggacagtggggatgggtgaatgagctggagatgggctatgggattctcagcctctcaacctgaggttccagctccctgtccctgaggcacccatrcctcatgcatattcctgcaacagccttcccaagggtatcctgcaactgccttgcactcttctcaaacatgtccagcactcagagtccttcacggccatcc

SEQ ID NO: 53200 - DNA, 201 bp, Homo sapiens; identical to SEQ ID NO: 20154

SEQ ID NO: 53201 - DNA, 201 bp, Homo sapiens; identical to SEQ ID NO: 20155

SEQ ID NO: 53202 - DNA, 201 bp, Homo sapiens; identical to SEQ ID NO: 20156

SEQ ID NO: 53203 - DNA, 201 bp, Homo sapiens; identical to SEQ ID NO: 20157

SEQ ID NO: 53204 - DNA, 201 bp, Homo sapiens; identical to SEQ ID NO: 20158

SEQ ID NO: 53205 - DNA, 201 bp, Homo sapiens; identical to SEQ ID NO: 20159

SEQ ID NO: 53206 - DNA, 201 bp, Homo sapiens; identical to SEQ ID NO: 20160

SEQ ID NO: 53207 - DNA, 201 bp, Homo sapiens; identical to SEQ ID NO: 20161

SEQ ID NO: 53208 - DNA, 201 bp, Homo sapiens; identical to SEQ ID NO: 20162

SEQ ID NO: 53209 - DNA, 201 bp, Homo sapiens; identical to SEQ ID NO: 20163

SEQ ID NO: 53210 - DNA, 201 bp, Homo sapiens; identical to SEQ ID NO: 20164

SEQ ID NO: 53211 - DNA, 201 bp, Homo sapiens; identical to SEQ ID NO: 20165

SEQ ID NO: 53212 - DNA, 201 bp, Homo sapiens; identical to SEQ ID NO: 20167

SEQ ID NO: 53213 - DNA, 201 bp, Homo sapiens; identical to SEQ ID NO: 20168

SEQ ID NO: 53214 - DNA, 201 bp, Homo sapiens
gtgggcggtcacttacatccgtgatggccttcttggccttctcctcggcgtttctgcactcctgcactgcctcctccacttccgactggagctgggtcagrtccgactccatcttcttcttctggttgatgaggctggtgttctagacatggagagagaaaaatgatcaaatatatactacactttgttacctgatttcat

SEQ ID NO: 53215 - DNA, 201 bp, Homo sapiens
cctcggcctggcgcttgtaggccttgaccttcagttgcagcttgtccaccaggtcctgtagccgcagcaggttctttttgtcttcctctgtctgggggtgrgagggtgggagaagctggtttggagggggagcaaatgcaatcacctttccctcctccatcattttactcttctccccttgcctttgctgcccctccctgc

SEQ ID NO: 53216 - DNA, 201 bp, Homo sapiens; identical to SEQ ID NO: 2631

SEQ ID NO: 53217 - DNA, 201 bp, Homo sapiens
ggcggtcacttacatccgtgatggccttcttggccttctcctcggcgtttctgcactcctgcactgcctcctccacttccgactggagctgggtcagatcmgactccatcttcttcttctggttgatgaggctggtgttctagacatggagagagaaaaatgatcaaatatatactacactttgttacctgatttcatacc

SEQ ID NO: 53218 - DNA, 201 bp, Homo sapiens; identical to SEQ ID NO: 20172

SEQ ID NO: 53219 - DNA, 201 bp, Homo sapiens; identical to SEQ ID NO: 20173

SEQ ID NO: 53220 - DNA, 201 bp, Homo sapiens; identical to SEQ ID NO: 20174

SEQ ID NO: 53221 - DNA, 201 bp, Homo sapiens; identical to SEQ ID NO: 20175

SEQ ID NO: 53222 - DNA, 201 bp, Homo sapiens; identical to SEQ ID NO: 20176

SEQ ID NO: 53223 - DNA, 201 bp, Homo sapiens; identical to SEQ ID NO: 20177

SEQ ID NO: 53224 - DNA, 201 bp, Homo sapiens; identical to SEQ ID NO: 20178

SEQ ID NO: 53225 - DNA, 201 bp, Homo sapiens; identical to SEQ ID NO: 20179

SEQ ID NO: 53226 - DNA, 201 bp, Homo sapiens; identical to SEQ ID NO: 20180

SEQ ID NO: 53227 - DNA, 201 bp, Homo sapiens
gcactgcctcctccacttccgactggagctgggtcagatccgactccatcttcttcttctggttgatgaggctggtgttctagacatggagagagaaaaaygatcaaatatatactacactttgttacctgatttcataccctttctccagaaagaattaaaggtggtcattttttttttaaaacaacaagcccactttta

SEQ ID NO: 53228 - DNA, 201 bp, Homo sapiens; identical to SEQ ID NO: 20181

SEQ ID NO: 53229 - DNA, 201 bp, Homo sapiens
tgcctggaccacattccagtctaattatatcagaatctcagggagtgagggctcacgtatgcatcgtttagaaaacatcctaggcatctcaaatttgcagsagaaattgccgtccacaccaagttgatgagctgaaatgtagactaacagtgggtaaatcagagtttaaagtagatggtctttaaggtctttttatgttct

SEQ ID NO: 53230 - DNA, 201 bp, Homo sapiens
gtacaacagctgtgaacacatgggtctcatctttgcggtccctaacacagtggttctcaaccttgtttacatgttagaatcacctgggaaagttttcaaaytactcttgcctggaccacattccagtctaattatatcagaatctcagggagtgagggctcacgtatgcatcgtttagaaaacatcctaggcatctcaaat

SEQ ID NO: 53231 - DNA, 201 bp, Homo sapiens
gggcgacagagtgagacttcgtctcaaaaaaaaaaaaaaaaaaaccatcaacaacaacaaaaaaagaacgtaacatcagcaagctacagagaagagtaaarcaggagttcttggattaatctctaagaggaattgtttgtgacactgtggccccattaaagcacaaataatctggattcatgttatagatttaaacatcat

SEQ ID NO: 53232 - DNA, 201 bp, Homo sapiens
ttctcctttctccctattccaccagtacaacagctgtgaacacatgggtctcatctttgcggtccctaacacagtggttctcaaccttgtttacatgttaraatcacctgggaaagttttcaaactactcttgcctggaccacattccagtctaattatatcagaatctcagggagtgagggctcacgtatgcatcgttta

SEQ ID NO: 53233 - DNA, 201 bp, Homo sapiens
ttagttgtgagaagatataaacgtttccatcttaaccattttacgtgtacagttcagtcatgtcaagtacattgacatcgtcatgcaaccctcaccaccawccatctccagaacccttttcatcttgcacagctgaaaccctgtgctcattaaatagctccctattccatccctccccacagccactggcagccaccatcc

SEQ ID NO: 53234 - DNA, 201 bp, Homo sapiens
aaagggaatccttagccataatttgagagagacactgctttcagggataagtaatgaagttcgaatcctgtgagggtccacagcagcctattatggggagmtttcaagaattctgaaagtttaggaagatattggtttcctgggcataattttttttagcaactccataatttccatggtgatactaatagagaattcaag

SEQ ID NO: 53235 - DNA, 201 bp, Homo sapiens
actgcactccagcctctgtctcaaaaacaaaaacaaaaataaagtattaacaatttttagttgtgagaagatataaacgtttccatcttaaccattttacstgtacagttcagtcatgtcaagtacattgacatcgtcatgcaaccctcaccaccatccatctccagaacccttttcatcttgcacagctgaaaccctgtg

SEQ ID NO: 53236 - DNA, 201 bp, Homo sapiens
gagtaactgagctccacctttgcttgagctttaaactcaccctgcggaagagagacattttagccccactcccttcctaccttgaagggtcctgcatgatrtgtgatttatcatggcttttctcctttctcttcttgtcctcatttttttggcagaattctctcagagtccccacatctgggtctcttcccttttggaggc

SEQ ID NO: 53237 - DNA, 201 bp, Homo sapiens
aggcatgagaatcacttgaacccgggaggaggcggaggttgcagtgagccaagatcccaccactgcactccagcctctgtctcaaaaacaaaaacaaaaayaaagtattaacaatttttagttgtgagaagatataaacgtttccatcttaaccattttacgtgtacagttcagtcatgtcaagtacattgacatcgtcat

SEQ ID NO: 53238 - DNA, 201 bp, Homo sapiens
gtggatcacctgaggccaggagtttgagaccagcctggccaacatggcgaaaccctgtctttaccaaaaatacaaacatctgccctgtgtggtggtgcacrcttataatcccagctactcaggaggctgaggcatgagaatcacttgaacccgggaggaggcggaggttgcagtgagccaagatcccaccactgcactcca

SEQ ID NO: 53239 - DNA, 201 bp, Homo sapiens
tttgtgtacgtctgtcctgtaaaacggtgtttcaggcccccatgccccatgtcctgtgtgtccaatatgtccacaagctcaccattctctctctctctctyttttcttttctttttctttttctttttttttttttttgagatggagtcttgctgttgtcgcctaggctggagtgcaatgatgcgatcctggctcactgca

SEQ ID NO: 53240 - DNA, 201 bp, Homo sapiens
tagatagaataggttctgtatttatttgggtctcgtggtcctcaccagagtcattggcatatgtggttcatttttttttttttttttttttgagatggagycctgctctgttgccaggctggagtgcagtggcacaatcccggctcactgcaacctctgcctcctgggttcaagcgattctcctgcctcagcctcccgagt

SEQ ID NO: 53241 - DNA, 201 bp, Homo sapiens
gccaggggtcaaggatgactggagctctgcctgctgaactcttccttgtgtgagtcttgctaatcttatcttcaggaagagttttcattagaaaataccawtaagagccaggcctggtggctcccgcctgtaatcctatcactttgggaggccaagaagggtggatcacctgaggccaggagtttgagaccagcctggcca

SEQ ID NO: 53242 - DNA, 201 bp, Homo sapiens
acgcctgtaatcccagcactttgggaggctgaggcaggtgaatcacttgagccccggagtttgcgaatagcctgggcaacatggcaaaaccccatttctayaaaaaatacaaaactaggccaggtatactggcacgtgcctgtagtcccagctacttgagagtctgaggtgggaggatcacttgagcacaggagatggagg

SEQ ID NO: 53243 - DNA, 201 bp, Homo sapiens
agtaaaacattatgccaggggtcaaggatgactggagctctgcctgctgaactcttccttgtgtgagtcttgctaatcttatcttcaggaagagttttcawtagaaaataccaataagagccaggcctggtggctcccgcctgtaatcctatcactttgggaggccaagaagggtggatcacctgaggccaggagtttgag

SEQ ID NO: 53244 - DNA, 201 bp, Homo sapiens
cgtgcgccactacacccagcttattttagtacttttaatagagacggggtttcatcatgttggccaggatggtcttgatctcttgaccttgtgatccgccygcctcggcctcccaaagtgctgggattacaggcgtgagccaccgcgcctggccgatgtggttcatatttcaggggtcccggaagagttgtttgaggtttc

SEQ ID NO: 53245 - DNA, 201 bp, Homo sapiens
tgtctcaaaaacaaaacaaaggaaacaaaaacaaaaactaaagttcagacttccagatagagagaggtccatagccttccaaattgcagatactagctagraaaaaccatggtatcagacagcagagggaaaatgtttttccattcttcccagacctcccctaagtctggtgttatagattaagtataaaaataacccttt

SEQ ID NO: 53246 - DNA, 201 bp, Homo sapiens
tttaggttagggtaaattcaaaaaaaatgacagagtcagtaaaacattatgccaggggtcaaggatgactggagctctgcctgctgaactcttccttgtgygagtcttgctaatcttatcttcaggaagagttttcattagaaaataccaataagagccaggcctggtggctcccgcctgtaatcctatcactttgggagg

SEQ ID NO: 53247 - DNA, 201 bp, Homo sapiens
aacctggaactagatagaataggttctgtatttatttgggtctcgtggtcctcaccagagtcattggcatatgtggttcatttttttttttttttttttttgagatggagtcctgctctgttgccaggctggagtgcagtggcacaatcccggctcactgcaacctctgcctcctgggttcaagcgattctcctgcctcag

SEQ ID NO: 53248 - DNA, 201 bp, Homo sapiens
taacctggaactagatagaataggttctgtatttatttgggtctcgtggtcctcaccagagtcattggcatatgtggttcatttttttttttttttttttttgagatggagtcctgctctgttgccaggctggagtgcagtggcacaatcccggctcactgcaacctctgcctcctgggttcaagcgattctcctgcctca

SEQ ID NO: 53249 - DNA, 201 bp, Homo sapiens
ccttcaggacttcctgaagtctccgtgccctttacctacatcaggcatctaaaatccatccgaggccaggcgtggtggcttggccaggcacagtggctcaygcctataatcccagcactttgggaggctgaggcaggcggatcacccaaagtcacgagttcgagaccagcctgaccaacatggtgaaaccccgtctctact

SEQ ID NO: 53250 - DNA, 201 bp, Homo sapiens
ggactgtgaagtgggataaggctagtcaagaagcctttcttagaagaaattagcttgaatgagtttttgttttgttttatttttttgagatggagtctcastctgtcacccaggctggagtgcagtcgcatgatctcggctcactgcaacctccgcctcctgagttcaagtgattctcccgcctcagcctcccgagtagct

SEQ ID NO: 53251 - DNA, 201 bp, Homo sapiens
agtgaggtagagatcatgtataacaagtaagggactgtgaagtgggataaggctagtcaagaagcctttcttagaagaaattagcttgaatgagtttttgktttgttttatttttttgagatggagtctcactctgtcacccaggctggagtgcagtcgcatgatctcggctcactgcaacctccgcctcctgagttcaag

SEQ ID NO: 53252 - DNA, 201 bp, Homo sapiens
tggctcacacctgtaatcccagcactttgggaggccgaggcaggccgttcacaaggtcaggagatcaagaccatcctggcgaacatcgtgaaaccccattytactaaaaatacaaaaaattagccgggtgtggtggtgggcacctgtagtcccagctacttgggaggctgaggcaggagaatggcgtgaacccgggaggcg

SEQ ID NO: 53253 - DNA, 201 bp, Homo sapiens
aagggcagcaagaaaccactgactatgaatggaaggcgagaatcccagacttggacgcgaagtttagttcacacgcgcggccaaagcaatccaacagcatrcgtccccaccctcctctcactgcctacccctctcctgcaaaagacctcccagtgactggagtgcaggccaagactttcagacagtttaaaccattttttt

SEQ ID NO: 53254 - DNA, 201 bp, Homo sapiens
aaaaaaagaggccgggcgcggtggctcacacctgtaatcccagcactttgggaggccgaggcaggccgttcacaaggtcaggagatcaagaccatcctggygaacatcgtgaaaccccattctactaaaaatacaaaaaattagccgggtgtggtggtgggcacctgtagtcccagctacttgggaggctgaggcaggaga

SEQ ID NO: 53255 - DNA, 201 bp, Homo sapiens
tgatggacgagagagtgcagaggcccagtgtgacttgtatttataaggaacagcggccgggcatggtggttcacgcctgtaatcccagcattttgggaggycaaggtgggcggatcacttgaggtcaggggttcgagaccagcctggccaacacggtgaaaccctatctctaccaaaactacaaaaattagccaggcaagg

SEQ ID NO: 53256 - DNA, 201 bp, Homo sapiens
ctaatttttgtacttttcgtagagatggggtttcaccatgttggctgggctggtctcaaactcctgacctcaagtgatccggccaccttggcctcccaaartgctgggattacaggtgtgagccaccgcgcccagccacctttctctttagagctcactctagtcattaagaatctcagtctcaatgtttgatttgtaaga

SEQ ID NO: 53257 - DNA, 201 bp, Homo sapiens
tttttgtgactggctcatgataaacactttttagatgactggttggaattaggagcaggtggcaccacaactggcccaggcctctcatctcctttttctcytttctccctattccaccagtacaacagctgtgaacacatgggtctcatctttgcggtccctaacacagtggttctcaaccttgtttacatgttagaatca

SEQ ID NO: 53258 - DNA, 201 bp, Homo sapiens
ataggcagaaagaggaggacaaagaggaggaaagccagtttgctgttcaggaagagaaaagtacaactcatataattgacaactgtttgattgaatgagasttctgctactgtggtttcccagggagggaagaagggatagaggagaaaggaagaaacacaatggcaggctgcattcccctttgtgtacgtctgtcctgta

SEQ ID NO: 53259 - DNA, 201 bp, Homo sapiens
cttggcctagaagcccagaccctataattcagaagaaaagggaaggggtcagttctgctctcaactgtgtataaagggacaaaacccaccatgtgtatttsgacaatgctcatggaagaaattcagaagtggtcattttaggttagggtaaattcaaaaaaaatgacagagtcagtaaaacattatgccaggggtcaagga

SEQ ID NO: 53260 - DNA, 201 bp, Homo sapiens
agagtttcttctggaggatgtcacagagaattccatcctgcagtgcttcttctcttgtgcagggattcaaaaggacacaagccttggcatcactgtgtatygtgagtagggctgagggctgggggcagggggatggaaaggaggaatggggaaacatgaacatgtcttatttagggaaggatgggacaaatgtttctaatt

SEQ ID NO: 53261 - DNA, 201 bp, Homo sapiens
ctttctggagaggtgggtggcatgctcatcaagtcctgcctttttgtcttaaagagccaccagagcaagtgatcctggagctgcagcctgcctgggtggcygtggacgaagccttcacagtgaagtgtcatgtacccagtgtagcacccttggagagtctcacccttgcccttctccagggtaaccaagaactgcatagaa

SEQ ID NO: 53262 - DNA, 201 bp, Homo sapiens
cagcggtgctcattgtgtgcctcagcactccagggccttctgaattaaagaagcatccaggcaaagtgtcagcttgtcttggcctagaagcccagaccctrtaattcagaagaaaagggaaggggtcagttctgctctcaactgtgtataaagggacaaaacccaccatgtgtatttggacaatgctcatggaagaaattc

SEQ ID NO: 53263 - DNA, 201 bp, Homo sapiens
cccagcactttgggaggctgaggcgggtggatggctagcggtcaggagttcaagagcagcctgaccaacatgatgaaaccctgtctctactaaaaatacaratattagccaggcatgatcgtgggtgcctgtaattccagctactcaggaggctgaggcaggagaattgcttgaaacctgggaggcggaggtggcagtgag

SEQ ID NO: 53264 - DNA, 201 bp, Homo sapiens
tggtggtaattaagcacatcattataatcacagtaaactcaaagcaagaatcagaaatccatggtaaccttgagcaccatcaaaagtcatatacaccgtgygcagctttctgatttttctactctttttcttgctccttcccctactttccccccagtttggtcccctaagatttaggactactaatagggtgaccagtcc

SEQ ID NO: 53265 - DNA, 201 bp, Homo sapiens
tctttagacctgagaaagagtaagttacatctttagtgggacttcttaccataggattaataatagtatttaccttagaagattatacttagaaagaaatsacataatacttgcaataaactagcatgttgctggagacatgtgtttacatttgttggtttttgtgattacactgataattctggtggtaattaagcacat

SEQ ID NO: 53266 - DNA, 201 bp, Homo sapiens
caggaagggtctcatatctcttttccagtatgatagagcttctaagggtagctgcctcattgtctataggaggaggccccacccctaaatgattttgatcrtattctttctgaacattaaagcaaccagctcacgcttaaattgcaggtatcttgattatctccagaggaagagtggcctttaatactccaaaattttatc

SEQ ID NO: 53267 - DNA, 201 bp, Homo sapiens
ttttggagacagagtctcgctctgtctcccaggctggagtgcagtggcgcaatctcggctcactgcaacttctgcttcccggcttcaagcaattttccctkctcaacctctagagtagctgggattacaggtgtctgccaccacacccggctaatttttgtgttattagtagagacagggtttcatcatgttggccaggct

SEQ ID NO: 53268 - DNA, 201 bp, Homo sapiens
ttttttggagacagagtctcgctctgtctcccaggctggagtgcagtggcgcaatctcggctcactgcaacttctgcttcccggcttcaagcaattttcccttctcaacctctagagtagctgggattacaggtgtctgccaccacacccggctaatttttgtgttattagtagagacagggtttcatcatgttggccagg

SEQ ID NO: 53269 - DNA, 201 bp, Homo sapiens
acaaaagcaaacaaacaaaaaacaagacaaaaccaaaaaaagagggaagaagggggccacttggactttctagttccagcagggagatcctggaggctcarccggctgctgcctttgcttctcactgccacagggtgtcagtgtggacagatggtcccacacagtaccctcaaaccaagcgggtctgcagatctgggttcc

SEQ ID NO: 53270 - DNA, 201 bp, Homo sapiens
agttaagaagcaggtttaagagacaggagtatagagctgccccatgcagggatccacagacatttcggtgtcaggatcagccacatcaaggctatagttaycttgtatctgcaaaccctgcctcatggcctcagtgccttgaagcacagcgaatccaaaaaggaagggaaaaatgagccaggcatgccggtgtgcacctgt

SEQ ID NO: 53271 - DNA, 201 bp, Homo sapiens
agggacacgaaatatcttgactttgtaaaatagcatcatcccggaacatgaccttttcaacctcaatgtttccactaggtggagctactgctctctcatcmtgtgagtctaatataaatcatccaccttccctgaattgagcatttggggaagtaagttaagaagcaggtttaagagacaggagtatagagctgccccatg

SEQ ID NO: 53272 - DNA, 201 bp, Homo sapiens
caactggcccaggcctctcatctcctttttctcctttctccctattccaccagtacaacagctgtgaacacatgggtctcatctttgcggtccctaacacrgtggttctcaaccttgtttacatgttagaatcacctgggaaagttttcaaactactcttgcctggaccacattccagtctaattatatcagaatctcagg

SEQ ID NO: 53273 - DNA, 201 bp, Homo sapiens
tggctcatgataaacactttttagatgactggttggaattaggagcaggtggcaccacaactggcccaggcctctcatctcctttttctcctttctccctrttccaccagtacaacagctgtgaacacatgggtctcatctttgcggtccctaacacagtggttctcaaccttgtttacatgttagaatcacctgggaaag

SEQ ID NO: 53274 - DNA, 201 bp, Homo sapiens
ttttgtgactggctcatgataaacactttttagatgactggttggaattaggagcaggtggcaccacaactggcccaggcctctcatctcctttttctcckttctccctattccaccagtacaacagctgtgaacacatgggtctcatctttgcggtccctaacacagtggttctcaaccttgtttacatgttagaatcac

SEQ ID NO: 53275 - DNA, 201 bp, Homo sapiens
cggggtttcaccatgttggccaggctggcctgaaactcctacctcaggtgatccacccgcctcagcctcccaaagtgctgggattacaagtatgagccacygtgcccagtctaaactcagtttttcatgtttccatgccagcacccttctattgactcagtctaatagatggaggcaaactagtaaaaaggtaagtagaat

SEQ ID NO: 53276 - DNA, 201 bp, Homo sapiens
atcctatcactttgggaggccaagaagggtggatcacctgaggccaggagtttgagaccagcctggccaacatggcgaaaccctgtctttaccaaaaatamaaacatctgccctgtgtggtggtgcacgcttataatcccagctactcaggaggctgaggcatgagaatcacttgaacccgggaggaggcggaggttgcag

SEQ ID NO: 53277 - DNA, 201 bp, Homo sapiens
gaaaaccgctctccggccgcaccctcgcgcgcccccgcctggcggtgtagaacaaacggtctgagcgcttggcgggcgactgagagcggagcgggcgaggscgaggagcggaggctgaagccgtgaggagcggcccggcgagggcgaggggcgtgcgagcgggcggccgcggctcggtgaggatttcggtcgtgttttcct

SEQ ID NO: 53278 - DNA, 201 bp, Homo sapiens
ataataagcttttcgtttcaccacatacaaggcagtggggatacagtggtgaacaaaacattgtccctggcttccacaaatttattaggaaagcaagacamgtatgtaatgaacaaaaaagttcattacatttgagcatgaactcctatgactgggaaaacagattgttaagagaaagcataactcggatcaaggaaggct

SEQ ID NO: 53279 - DNA, 201 bp, Homo sapiens
agctccctattccatccctccccacagccactggcagccaccatcctactttttgtctctatgaatttgactgctctgagtacctcatctgactggaatcrgagagtatttgtctttttgtgactggctcatgataaacactttttagatgactggttggaattaggagcaggtggcaccacaactggcccaggcctctca

SEQ ID NO: 53280 - DNA, 201 bp, Homo sapiens
aaaacaaaggaaacaaaaacaaaaactaaagttcagacttccagatagagagaggtccatagccttccaaattgcagatactagctagaaaaaaccatggyatcagacagcagagggaaaatgtttttccattcttcccagacctcccctaagtctggtgttatagattaagtataaaaataaccctttggaaggccaggc

SEQ ID NO: 53281 - DNA, 201 bp, Homo sapiens
agctcagggcagcagcctatttgacctgctttcaaaactgaaattcaggccgggggcagtggctcacgcctgtaatcccagcactttgggaggctgaggcrggtgaatcacttgagccccggagtttgcgaatagcctgggcaacatggcaaaaccccatttctacaaaaaatacaaaactaggccaggtatactggcacg

SEQ ID NO: 53282 - DNA, 201 bp, Homo sapiens
tttcaccatcttgactaggctagtcttgaagtcctgacctcgcgatccacccaccttggcctcctaaagtgctggtattactggcgtgagccaccgctctyggctgcattttataactttaagtacaatttctaaggaaaaaataccgtgttgatagcataaacaaccagctcagggcagggggtgcattagctcagggca

SEQ ID NO: 53283 - DNA, 201 bp, Homo sapiens
ttccatgaaattggcctcataggttaagagctccaaacatctctgaattccttttcatagagtgatcaactgtgagttcgcatttgtcagttttttttttktacccatgtgggtgtctaggttagagttgcaatgtttactctcccttttcatcaataaggacatattttcttctgtctgtaagcaatttccttgaagctt

SEQ ID NO: 53284 - DNA, 201 bp, Homo sapiens
tgagcttgttgacatcattaaggatcagtggcaagcttcaactcagtaaccatctgttgtgggtcttgggggagtatacagatggtaagaaattccacttygggccagacaagcatcctatctagcccagtgttctgtctctgaagtagaaggtagagttcttccatgaaattggcctcataggttaagagctccaaacat

SEQ ID NO: 53285 - DNA, 201 bp, Homo sapiens
tactcttcggcttcagggagccccagacctccctgctggggagcctgcctggcttctacttactgccagggaggaagatgatggctgaaatttctcctgckaggcctctttggtggtgcagggtcagcggttgatgaaaaccactgtgatccagctccatatcctatgtgagtggaggcctgatctttcttgtcaaaataa

SEQ ID NO: 53286 - DNA, 201 bp, Homo sapiens
gctcccctgacctgggcttctggagggccagctcccagagctgagcttgttgacatcattaaggatcagtggcaagcttcaactcagtaaccatctgttgygggtcttgggggagtatacagatggtaagaaattccactttgggccagacaagcatcctatctagcccagtgttctgtctctgaagtagaaggtagagtt

SEQ ID NO: 53287 - DNA, 201 bp, Homo sapiens
tgctagttttgagaaatgtgtctggttctccttttcctttccttataggcttccctccaccaatcctggagctaaaagaatcatacccattggcagggacygacattaatgtgacctgctcagggcatgtattaacatcacccagccctactcttcggcttcagggagccccagacctccctgctggggagcctgcctggc

SEQ ID NO: 53288 - DNA, 201 bp, Homo sapiens
acaggactttgaagggagtaagtatcaaatatggggctaggaatcagagctctgttcccatctccactttcccttgctcccctgacctgggcttctggagkgccagctcccagagctgagcttgttgacatcattaaggatcagtggcaagcttcaactcagtaaccatctgttgtgggtcttgggggagtatacagatgg

SEQ ID NO: 53289 - DNA, 201 bp, Homo sapiens
tgggaaagttttcaaactactcttgcctggaccacattccagtctaattatatcagaatctcagggagtgagggctcacgtatgcatcgtttagaaaacaycctaggcatctcaaatttgcagcagaaattgccgtccacaccaagttgatgagctgaaatgtagactaacagtgggtaaatcagagtttaaagtagatgg

SEQ ID NO: 53290 - DNA, 201 bp, Homo sapiens
aaatgcaactcatatttcatggttttctgattactaactgggaactaaatttgtagtccagggacaggactttgaagggagtaagtatcaaatatggggcyaggaatcagagctctgttcccatctccactttcccttgctcccctgacctgggcttctggagggccagctcccagagctgagcttgttgacatcattaag

SEQ ID NO: 53291 - DNA, 201 bp, Homo sapiens
ctggagtgcagtagcacaatcttggctcactgcaacctctgcctcccgggttcaagcaattctctgcctcagcctcccgagcagctgggattacaggcacytgccaccgcacctggctaatttttgtatttttagtagagactgggtttcaccatcttggcctggctggtctggaactcctgacctcaagtgatccgcttg

SEQ ID NO: 53292 - DNA, 201 bp, Homo sapiens
gcctggaccacattccagtctaattatatcagaatctcagggagtgagggctcacgtatgcatcgtttagaaaacatcctaggcatctcaaatttgcagcrgaaattgccgtccacaccaagttgatgagctgaaatgtagactaacagtgggtaaatcagagtttaaagtagatggtctttaaggtctttttatgttcta

SEQ ID NO: 53293 - DNA, 201 bp, Homo sapiens
gtttacatgttagaatcacctgggaaagttttcaaactactcttgcctggaccacattccagtctaattatatcagaatctcagggagtgagggctcacgwatgcatcgtttagaaaacatcctaggcatctcaaatttgcagcagaaattgccgtccacaccaagttgatgagctgaaatgtagactaacagtgggtaaa

SEQ ID NO: 53294 - DNA, 201 bp, Homo sapiens
ttttctcttaaatatcatactaaagtcaggcacatcttagaaatgcaactcatatttcatggttttctgattactaactgggaactaaatttgtagtccarggacaggactttgaagggagtaagtatcaaatatggggctaggaatcagagctctgttcccatctccactttcccttgctcccctgacctgggcttctgg

SEQ ID NO: 53295 - DNA, 201 bp, Homo sapiens
tttttttgagatggagtcttgctgttgtcgcctaggctggagtgcaatgatgcgatcctggctcactgcaactgcagcctcccgggttcaggtgattctcytgcctcagcctccctggcagctgggattacaggtgcacaccaccatgcctgtctaatttttgtacttttcgtagagatggggtttcaccatgttggctgg

SEQ ID NO: 53296 - DNA, 201 bp, Homo sapiens
agggcagcaagaaaccactgactatgaatggaaggcgagaatcccagacttggacgcgaagtttagttcacacgcgcggccaaagcaatccaacagcatgmgtccccaccctcctctcactgcctacccctctcctgcaaaagacctcccagtgactggagtgcaggccaagactttcagacagtttaaaccatttttttt

SEQ ID NO: 53297 - DNA, 201 bp, Homo sapiens
ggggtttcaccatgttggctgggctggtctcaaactcctgacctcaagtgatccggccaccttggcctcccaaagtgctgggattacaggtgtgagccacygcgcccagccacctttctctttagagctcactctagtcattaagaatctcagtctcaatgtttgatttgtaagaaggcctcttgctccttgccaggtgct

SEQ ID NO: 53298 - DNA, 201 bp, Homo sapiens
gtttcaccatgttggctgggctggtctcaaactcctgacctcaagtgatccggccaccttggcctcccaaagtgctgggattacaggtgtgagccaccgcrcccagccacctttctctttagagctcactctagtcattaagaatctcagtctcaatgtttgatttgtaagaaggcctcttgctccttgccaggtgcttca

SEQ ID NO: 53299 - DNA, 201 bp, Homo sapiens
tggaagagccttgatggccacgcggtgtcctcgcccctctctccgctggacccgaggccccttgccagcaagagctggcctggtgtccggtatccacgtgkggggcagtggccctcacacaaggattggtacccatctatctagtgcgttggttcgtgcattcacttgttcctttgtggtcgttgaacgcctgtaacgttc

SEQ ID NO: 53300 - DNA, 201 bp, Homo sapiens
tcccctaagtctggtgttatagattaagtataaaaataaccctttggaaggccaggcacggtggctcatgcctgtaatcccagcactttcggaggccaagsggggcggatcacaaggttaggagatcgagaccagcctggctaacacggtgaaaccccgtctctactaaaaatacaaaaaaattagctgggcatggtggtg

SEQ ID NO: 53301 - DNA, 201 bp, Homo sapiens
gacaggaggaaattgctctataggcagaaagaggaggacaaagaggaggaaagccagtttgctgttcaggaagagaaaagtacaactcatataattgacarctgtttgattgaatgagacttctgctactgtggtttcccagggagggaagaagggatagaggagaaaggaagaaacacaatggcaggctgcattcccctt

SEQ ID NO: 53302 - DNA, 201 bp, Homo sapiens
ttcccctttgtgtacgtctgtcctgtaaaacggtgtttcaggcccccatgccccatgtcctgtgtgtccaatatgtccacaagctcaccattctctctctstctctcttttcttttctttttctttttctttttttttttttttgagatggagtcttgctgttgtcgcctaggctggagtgcaatgatgcgatcctggctc

SEQ ID NO: 53303 - DNA, 201 bp, Homo sapiens
ctgggcatgggggcacatgcctgtagtcccagctactctggaaactgaggcaggagaatcgcttgaacctgggaggtggaggttacagtgagctgagatcrcgccactgtacatactccagcttggcgacagagcaagactccatctcaaaacaaacaaacgaacaaaaaaaacaccctaggtttcatctgggactcccta

SEQ ID NO: 53304 - DNA, 201 bp, Homo sapiens
acctgggaggcggaggtggcagtgagctgagatcacgccactgcattctagcctggatgacaaagcgagacttcgtctcaaaaaaaaaaaaaaaaaaaaargaaaagaaaaaatcctcatctctgagttcaccactacctagctccttacccactgagaagcaaagatgggaagcaggggccccagggccaccatggacag

SEQ ID NO: 53305 - DNA, 201 bp, Homo sapiens
ggaaacatatgctaataatgtttatggttaaattaccaaaaagtataagattagcctggccacagtggttcatgctttaatcccagcactttgggaggccraggcaggaggatcacttgaggccaggagtttcagaccagcttgagaaacacagtgagacctctgtttctacaaaagaagtttttaaaattagccaggcat

SEQ ID NO: 53306 - DNA, 201 bp, Homo sapiens
gtaaggatcactggaggccagtagttcaagattagcctggacaacatagtgagacccctgtctctacaaaaacattaataaaaaaattatctgggtgtggwggtgtgtgcttgtagtccctgcgactcaagagactgaggtgggaggattgcttgagcccaggaatttgaggctgcagcaagctgtgatcataccactgca

SEQ ID NO: 53307 - DNA, 201 bp, Homo sapiens
cttttaaaacacgcaagctgagagataattataattgtgctcattccatcgacttctaaagactgagatttctaaataattttaaggccaaatgaaggacrttgcaggaatattgattccagctttgtgcaagaaatagttttttgcaatgagagtggtttaatagaatgaggagccttgtgaaagtgattcctttggttc

SEQ ID NO: 53308 - DNA, 201 bp, Homo sapiens
aaaaaaaaaaagaggccgggcgcggtggctcacacctgtaatcccagcactttgggaggccgaggcaggccgttcacaaggtcaggagatcaagaccatcmtggcgaacatcgtgaaaccccattctactaaaaatacaaaaaattagccgggtgtggtggtgggcacctgtagtcccagctacttgggaggctgaggcag

SEQ ID NO: 53309 - DNA, 201 bp, Homo sapiens
tggattctcctacacccgaggggagctgggtggacagtctctggcatgtggctccccctgcagttcagttatatgttatgaccaccccactttagaacccycttagccacccaagtaggcgctggacattgtcattccactgtcacgtgcattcaacaaatacttattaagatggctcacaattccttttaaaacacgcaa

SEQ ID NO: 53310 - DNA, 201 bp, Homo sapiens
tctcaaccagcagtggttgagtggattctcctacacccgaggggagctgggtggacagtctctggcatgtggctccccctgcagttcagttatatgttatsaccaccccactttagaaccctcttagccacccaagtaggcgctggacattgtcattccactgtcacgtgcattcaacaaatacttattaagatggctcac

SEQ ID NO: 53311 - DNA, 201 bp, Homo sapiens
cacgccactgcattctagcctggatgacaaagcgagacttcgtctcaaaaaaaaaaaaaaaaaaaaaagaaaagaaaaaatcctcatctctgagttcaccrctacctagctccttacccactgagaagcaaagatgggaagcaggggccccagggccaccatggacagagcagggttatcatgtagtctgaatccgtaaaa

SEQ ID NO: 53312 - DNA, 201 bp, Homo sapiens
tgtgactggctcatgataaacactttttagatgactggttggaattaggagcaggtggcaccacaactggcccaggcctctcatctcctttttctcctttytccctattccaccagtacaacagctgtgaacacatgggtctcatctttgcggtccctaacacagtggttctcaaccttgtttacatgttagaatcacctg

SEQ ID NO: 53313 - DNA, 201 bp, Homo sapiens
aattctcaaccagcagtggttgagtggattctcctacacccgaggggagctgggtggacagtctctggcatgtggctccccctgcagttcagttatatgtyatgaccaccccactttagaaccctcttagccacccaagtaggcgctggacattgtcattccactgtcacgtgcattcaacaaatacttattaagatggct

SEQ ID NO: 53314 - DNA, 201 bp, Homo sapiens
acgccactgcattctagcctggatgacaaagcgagacttcgtctcaaaaaaaaaaaaaaaaaaaaaagaaaagaaaaaatcctcatctctgagttcaccaytacctagctccttacccactgagaagcaaagatgggaagcaggggccccagggccaccatggacagagcagggttatcatgtagtctgaatccgtaaaaa

SEQ ID NO: 53315 - DNA, 201 bp, Homo sapiens
tccactgcccttttctcttaaatatcatactaaagtcaggcacatcttagaaatgcaactcatatttcatggttttctgattactaactgggaactaaatytgtagtccagggacaggactttgaagggagtaagtatcaaatatggggctaggaatcagagctctgttcccatctccactttcccttgctcccctgacct

SEQ ID NO: 53316 - DNA, 201 bp, Homo sapiens
gttctaaaatgtgcaaagtcagctagtatctaattctcaaccagcagtggttgagtggattctcctacacccgaggggagctgggtggacagtctctggcrtgtggctccccctgcagttcagttatatgttatgaccaccccactttagaaccctcttagccacccaagtaggcgctggacattgtcattccactgtcac

SEQ ID NO: 53317 - DNA, 201 bp, Homo sapiens
ggcctcttgctccttgccaggtgcttcatcagtccactcttagatacaaaaaaaagatcctgctgtttctttatggtttccactgcccttttctcttaaayatcatactaaagtcaggcacatcttagaaatgcaactcatatttcatggttttctgattactaactgggaactaaatttgtagtccagggacaggacttt

SEQ ID NO: 53318 - DNA, 201 bp, Homo sapiens
gcagcagaaattgccgtccacaccaagttgatgagctgaaatgtagactaacagtgggtaaatcagagtttaaagtagatggtctttaaggtctttttatrttctaaaatgtgcaaagtcagctagtatctaattctcaaccagcagtggttgagtggattctcctacacccgaggggagctgggtggacagtctctggca

SEQ ID NO: 53319 - DNA, 201 bp, Homo sapiens
aggaggaaattgctctataggcagaaagaggaggacaaagaggaggaaagccagtttgctgttcaggaagagaaaagtacaactcatataattgacaactrtttgattgaatgagacttctgctactgtggtttcccagggagggaagaagggatagaggagaaaggaagaaacacaatggcaggctgcattcccctttgt

SEQ ID NO: 53320 - DNA, 201 bp, Homo sapiens
gccactaaccagctgggctctgtcagcaaagacattgctgtcattgttcaaggtaacctttgctgccctgctgccaggcccaggatggaaacccctcaggrgtttgggattcttatctaagcatgaaaataagaaagattctactaggttgggaagaatgagactcagaagtgggcctggtgggctggggtgggtgatcct

SEQ ID NO: 53321 - DNA, 201 bp, Homo sapiens
aagccacagttagaggaatccagttgccctggcaaacagacctggctggaagggatggaacacacgctcgcctgcgtcccaaagggaaacccagctccagycttggtgtgtacctggaatggggtggtctttgaccttgaagtgccacagaaggcaacctagaaccacactggaacctaccgctacacagccactaaccag

SEQ ID NO: 53322 - DNA, 201 bp, Homo sapiens
cacagacatttcggtgtcaggatcagccacatcaaggctatagttatcttgtatctgcaaaccctgcctcatggcctcagtgccttgaagcacagcgaatycaaaaaggaagggaaaaatgagccaggcatgccggtgtgcacctgtaatcccagctactggggaggctgaggcaggagaatcgcttgaacctgggaggca

SEQ ID NO: 53323 - DNA, 201 bp, Homo sapiens
gtgcactgaactcagctctttgggaaactgtttttgcaggcaagccacagttagaggaatccagttgccctggcaaacagacctggctggaagggatggaacacacgctcgcctgcgtcccaaagggaaacccagctccagccttggtgtgtacctggaatggggtggtctttgaccttgaagtgccacagaaggcaacct

SEQ ID NO: 53324 - DNA, 201 bp, Homo sapiens
atcccaacactttggaaggtcaaggcgggcggatcatgaggtcaagagatcgagaccatcctggccaacatggtgaaacaccatctctactacagatacaraaattagctgggcatgggggcacatgcctgtagtcccagctactctggaaactgaggcaggagaatcgcttgaacctgggaggtggaggttacagtgagc

SEQ ID NO: 53325 - DNA, 201 bp, Homo sapiens
ctggtgactcacgcctgtaatcccaacactttggaaggtcaaggcgggcggatcatgaggtcaagagatcgagaccatcctggccaacatggtgaaacacyatctctactacagatacaaaaattagctgggcatgggggcacatgcctgtagtcccagctactctggaaactgaggcaggagaatcgcttgaacctggga

SEQ ID NO: 53326 - DNA, 201 bp, Homo sapiens
actccagtctgggcaacaagagcaaactccgtctcaaaaaaaaaaaaaaaaaaaggaaagaaagaagagaaaagatagaaaacagcaagaaacccttgaayatgaaaatatgaatggaaggcaagaaagaaagaaggagggagggaagggagggagggagggaaggaaggaaggaggcagggagggaagggagagggagag

SEQ ID NO: 53327 - DNA, 201 bp, Homo sapiens
cagtagcacaatcttggctcactgcaacctctgcctcccgggttcaagcaattctctgcctcagcctcccgagcagctgggattacaggcacctgccaccrcacctggctaatttttgtatttttagtagagactgggtttcaccatcttggcctggctggtctggaactcctgacctcaagtgatccgcttgccttggcc

SEQ ID NO: 53328 - DNA, 201 bp, Homo sapiens
gtttctaattaggggagataattaaggcccttaataaagatttctggcatactgtagggattctagatccaatcacctttttcatttatttttttttttttgagatggaatcttgctctattgctcaggctagagtgcagtggtgtgatctcagctaactgcagcctccacctgggttcaagcaattctcctgcctcagcc

SEQ ID NO: 53329 - DNA, 201 bp, Homo sapiens
ctgcctcctgggttcaagcgattctcctgcctcagcctcccgagtagctgggattacaggcgtgcgccactacacccagcttattttagtacttttaatasagacggggtttcatcatgttggccaggatggtcttgatctcttgaccttgtgatccgcccgcctcggcctcccaaagtgctgggattacaggcgtgagcc

SEQ ID NO: 53330 - DNA, 201 bp, Homo sapiens
gcctcctgagtagctgggattacaggcacgcatcaccatgcctggctaattttgtatttttagtagagacggggtttctccatattggtcaggctggtctytaacttccaacctcgggtgatccgcccaccttggcctcccaaagtggggaggattacaggcgtgaaccaccccgcccggccaattacaggtcttttgtcc

SEQ ID NO: 53331 - DNA, 201 bp, Homo sapiens
atatatatatttttggtcactttctccagcattgctgtctttttctctccagcctttggcccttcttatcaggatgaaaacgcttctgtttggtgtctggrccctgctggccttgatcctttgcccaggtgaggctattcgggaaagctttttaaaccagtatgtgtcaggacacaggtagctggtcagtgaggaaggggg

SEQ ID NO: 53332 - DNA, 201 bp, Homo sapiens
ccactgcactccagcctctgtctcaaaaacaaaaacaaaaataaagtattaacaatttttagttgtgagaagatataaacgtttccatcttaaccattttrcgtgtacagttcagtcatgtcaagtacattgacatcgtcatgcaaccctcaccaccatccatctccagaacccttttcatcttgcacagctgaaaccctg

SEQ ID NO: 53333 - DNA, 201 bp, Homo sapiens
taaggctagtcaagaagcctttcttagaagaaattagcttgaatgagtttttgttttgttttatttttttgagatggagtctcactctgtcacccaggctrgagtgcagtcgcatgatctcggctcactgcaacctccgcctcctgagttcaagtgattctcccgcctcagcctcccgagtagctgggattataggcaccc

SEQ ID NO: 53334 - DNA, 201 bp, Homo sapiens
acttgataggaaagtaggacttccagactctgagcactttctctgttggcagcttgtttgcccaaaccatgtgtgctttatagtgcaaggactggcagttygtatggatggacttggaggaatgcagcatcctcagcccggtttctacctgttctgctgtgctggaatagtgataccagcgtggcctttcctccttccctc

SEQ ID NO: 53335 - DNA, 201 bp, Homo sapiens
cttgataggaaagtaggacttccagactctgagcactttctctgttggcagcttgtttgcccaaaccatgtgtgctttatagtgcaaggactggcagtttktatggatggacttggaggaatgcagcatcctcagcccggtttctacctgttctgctgtgctggaatagtgataccagcgtggcctttcctccttccctct

SEQ ID NO: 53336 - DNA, 201 bp, Homo sapiens
gcactttctctgttggcagcttgtttgcccaaaccatgtgtgctttatagtgcaaggactggcagtttgtatggatggacttggaggaatgcagcatcctyagcccggtttctacctgttctgctgtgctggaatagtgataccagcgtggcctttcctccttccctctgggctatcaactacctaggatgccggctgcca

SEQ ID NO: 53337 - DNA, 201 bp, Homo sapiens
gattttcagtccttaccaattttaatacatcgatctttttagactttcagaaattagattttaaaaggcgtgactcttcagctggatctcaaggatgtatragaaaattatgggctcagataggtaatgccattgttgaaacaatctgagtctatctttgggccctgttgtttcttctaaatgttctttaatacagtacga

SEQ ID NO: 53338 - DNA, 201 bp, Homo sapiens
gttttctgataataattaatcagggtgtttcaaactcattaagttattaattagcttgaccttacagggaataaataccttggggtcttttgacttttttkttgttgttgttgttataaactataaagtatctaggaagtttctaatttcctgtagatggtaaccaaaagatttatcttaccacatattacattaggatgt

SEQ ID NO: 53339 - DNA, 201 bp, Homo sapiens
aagattaggactagaggtactagtcaagtgaacacttgttgggagtcttaccttttaattacttagcttctcttgggttttgagtagggtcagactactascacaaagaaattgggaagttctataatatcaagataatagtcccttgtgatttaaaaatataaatctatccctattatctggggtttccagaacttcttc

SEQ ID NO: 53340 - DNA, 201 bp, Homo sapiens
agccagccacaactcagttctagtaggtggttgcattccagttgggaatacttgcctagtagtgccagatatttctatttttcaaaagaagtcagcaatcygtaattttaaaaaaataataaatcttgaataacataaaatatcctagtcactatttgaatttccccaattaggtcatttttttaaaaaccagtttgttca

SEQ ID NO: 53341 - DNA, 201 bp, Homo sapiens
aatactgttttgcccatgcccttgaagttcaaaatctaggtgggatgagaaatatccacacttattaaataacagaggctttaaaaagatcaagataataygtatgcaatgtcacaaaacattgaataattaattgttggatgagatatagataacaaataccatgaaaataagtttatcaaagcagagagtgagtatcat

SEQ ID NO: 53342 - DNA, 201 bp, Homo sapiens
acggggcattagtttatgttcataatccaataaatggttttgtgaaaatcccacagtctcgggcacatacctatgatctgtaactagataagtcctgtggytgtcagtcagggtcttcactattctttctcctcttggtagacaacctcttgtgcccctgggaagtagaggaggaggaggagacctttaaattggtaacct

SEQ ID NO: 53343 - DNA, 201 bp, Homo sapiens
gaaggggtgggaaagagctaaggcatgtgggcatctgttgttggaggaacacgtgggagtgcggtgtcagtgcgtggctgctgttcctctttgcgggagtstctccagccacttacggaaggttgccttctgctagggacaaccctcccagggctgactgagaagtgttttggcctaggagtttcctgggacctgtcaaga

SEQ ID NO: 53344 - DNA, 201 bp, Homo sapiens; identical to SEQ ID NO: 9684

SEQ ID NO: 53345 - DNA, 201 bp, Homo sapiens
ggcagtacctgtgtctcttgctgagggaagcatctggctcccattttctcatcccctctgctctgttggtggccacagaccacattccagagtagaggggyttaccctggggtggaaacctgagcctgcccagcagaggttgggagcctgaggtcatgctccagatgacttgccacttggagccatacttgtctgagcacg

SEQ ID NO: 53346 - DNA, 201 bp, Homo sapiens
aagctgtatatggtaatatgttccatatccctcctagtttctggtagcttgttggcaatccttggcactccttatcttgtagatgcatcatcctgatctckgcctatgtgatcacatggtgttctccctctgtatgtatccatatccaaatttcctctttttataaggacactggtcatattggattaaggaccctttcta

SEQ ID NO: 53347 - DNA, 201 bp, Homo sapiens
tttggtgagcaagggatacttgctgactgaatcttttgtgggcatttctcactttcccctgggttcctgttggctggtagtaggtatacaatgcccatgtrttccttcctcctcttccctgccccagcaagcagtcaaggagaaccagaagcggcgggagacagaagaaaagatgaggcgagcaaaactagccaaggagaa

SEQ ID NO: 53348 - DNA, 201 bp, Homo sapiens
ttgccaaatgtaacctatctcaaggcatcagaatattctttcttcctcttgctccttttatgagaactctgtggaaatgagagatgaggaggagcattgcmatccacttctctttgtgtctgtgtatgtatacgtgggtgggtggagtgggcgagattgctggtgtgcttttgatacccgtggcttagttttcttgaacta

SEQ ID NO: 53349 - DNA, 201 bp, Homo sapiens
atgaggcgagcaaaactagccaaggagaaggcagagaaggagcggctagagaagcagcagaagagagagcaactcatagacatgaatgcaggtgaggagtraagacgggttgatgggctgagataggaatgttgggaagacttctctgcctagagtctagaggcagagtctcatgtctgagctcacctcctggcaaatgat

SEQ ID NO: 53350 - DNA, 201 bp, Homo sapiens
ggagaaggcagagaaggagcggctagagaagcagcagaagagagagcaactcatagacatgaatgcaggtgaggagtgaagacgggttgatgggctgagayaggaatgttgggaagacttctctgcctagagtctagaggcagagtctcatgtctgagctcacctcctggcaaatgatttttggcagtcttcactccgaga

SEQ ID NO: 53351 - DNA, 201 bp, Homo sapiens
ttaaactattaccttttctctcctttgctcgctcttgcattctctctcattcccctgtgattgtggtattgctgtgatatatactgttttccttctgtccrtccaaaggttcctctggcctgttctcattccctccactaaatctttcgggtttttttctgtaaaatattttcctgacgctcctcccatcttttaattgtg

SEQ ID NO: 53352 - DNA, 201 bp, Homo sapiens
atggacagtcttctagaagccctgcagtcaggggcagcattccgacggaagagagggccccgtcaaggtaagtaagcacatggagctcatcctgggtgtcraagggggtgagggctctctactcctgccagtctgcggctaaagagcaaataatgatgctctaagcatctttttagtccctgcatccagaacggattatct

SEQ ID NO: 53353 - DNA, 201 bp, Homo sapiens
gcattcaccagtatctcaacattgttcccttttcccacacagcctgtgggactgttctcttgtagtcaaaatatttatctggttctatggctacttttcartagtctaataacaagtgagtaagttgggggaagcatggggaggtcagtttttcttgactgttcaacctgctgagcataatggtgagtgagtggaaagctg

SEQ ID NO: 53354 - DNA, 201 bp, Homo sapiens
atacaagtaaacatgagcgtgtgagacttaaggctgagctctctttgcctcttcttagctgccagctgctgtgggagaggggaaatcaagcaatagccatkcattttgtgtggggcttgatatttgccatgctgctctggctgaagagttcacatctccatcttgttctttataacagagggcgatgagacaggtgtgatg

SEQ ID NO: 53355 - DNA, 201 bp, Homo sapiens; identical to SEQ ID NO: 9687

SEQ ID NO: 53356 - DNA, 201 bp, Homo sapiens
ctggagtgcaatggcgtgatctcggctcacagcaacctctgcttcccggtttcaagtgattctcctgcctcagcctcccaagtagctgggattacaggcayccgccaccatgcccagctaatttttgtattgttattagagaagagatttcacaacgttggccaggctggtctcaaactcctgacctcagggaatccacct

SEQ ID NO: 53357 - DNA, 201 bp, Homo sapiens
cgtgaatgggtgaatgaatagcagtctctaccaacaagaggaggagtggttctcaacggggcctgagaaatggctttggaaaagggtgctgggagaagatyagaacttagagtgagatcctgacctctctccccttgctttgcaggccagaggcacccaatgagttctatgatggagaccatgacaatgacaaggaaagcg

SEQ ID NO: 53358 - DNA, 201 bp, Homo sapiens; identical to SEQ ID NO: 9683

SEQ ID NO: 53359 - DNA, 201 bp, Homo sapiens
gcgcttccgcggcttccctccgcccctctcccttcccccattggtaggggctgcgggtccgggcggaagtggggcaggcgggcgggagcgaggcgtcgtcsttgtatattcatgaggcgcgcgcagcccggcatgctaatgaggcggggcgcggcggctggctaaagagcgactgggcggcggcgggcgcggagctgccag

SEQ ID NO: 53360 - DNA, 201 bp, Homo sapiens
catctacagtctattaaaatgaactggattctcctagagttcagttggcaggaaaaaagtactaggcttagatgtaaaaagcgtagtggctaaatgcctgtttttttttttttttttttgcatttagtaatttagactttgaagccattggaagaatcttaattaaaccttttttaggcatgaaaaaatagctattacagt

SEQ ID NO: 53361 - DNA, 201 bp, Homo sapiens
tttgtatttttagtagaggcggtgttttcaccatgttggccagtctggcctcaacctcctggtctcaagtaacccacccgtctcagcctcccagagtgccrtgtttacaggtgtgagctaccgcgcccggccatatgtagccttttcagttcagcttctttcttttagcagtatgcccttaagattagcactaagacaaca

SEQ ID NO: 53362 - DNA, 201 bp, Homo sapiens
aattaggaggacactgaggcctagtggtattaagttgctcaaagtcgtgtaattagatgacctaggttttagactccactaatattcttctcagtattctytctcacattgcattgtcatacctaaactttgtaactgtgccttgtcaggagtgtttccttaagcaaaataccactggagaagagtaaatactgataggca

SEQ ID NO: 53363 - DNA, 201 bp, Homo sapiens
tttttaaggtccatccttgatgcagaaagcattgtgtgtggttttctttcaataatacaaaataaatctttcatttatattgagtccatttttcttagagaaaaaaagtgtgtatatgtctatagagatttatactaaaatgttaactatacttatctttgaggaattttcatcagctgtaatagcttaaatttctaggga

SEQ ID NO: 53364 - DNA, 201 bp, Homo sapiens
gtcccccagatttaaaatgttgagctagccaagtgaaacattttatctttgggtttgacttagcttgagggccaccattttgtaacttctgtgttcagttwatctgcaagaggaaaaatgcatctggctggcagtggtggctcacacctgtaatcccagcactttgggaggccgaggtgggtggatcacgaggtcagcagt

SEQ ID NO: 53365 - DNA, 201 bp, Homo sapiens
ttgcagtgagccgaggttgtgccactgcactccagcctggcgacagagtgagactgtctcaaaaacaaaacaaaacaaaaaaattagccgggtgtggtggygggtgcctgtaatcctagctacttgggaggctgaggcaggagaattgcttgaacccaggagacggaggttgcagtgagccatacatcatgtcacccttgg

SEQ ID NO: 53366 - DNA, 201 bp, Homo sapiens
tcatttacagtttgtgtggtttttggtttttcgtaaatacaaatagggtcattctacgtatgctgctttacatcatatagctgttttcagctagctaatayagatctgcttcagtattttatcagctgtataataatttactatgtggatagattattttccatttttttggtattacaataataatgtggcaatgaaccc

SEQ ID NO: 53367 - DNA, 201 bp, Homo sapiens
tacagagtcagtatggtaagttagataggaggaagactgatttcttcttttcatgtcagaagagtcttgaactgcttgtgaaccagaggaaccatgcctgygtaagaggttaaaggggtaaagaatttgatgtgtggcttgttatgtaagtgaaaatggatcactgctaatgcttttttctgtttctcagctggagagatt

SEQ ID NO: 53368 - DNA, 201 bp, Homo sapiens
ttccatttttttggtattacaataataatgtggcaatgaacccccttacattatacatctttgcattcttgtttgagtgggttagatagtagaatggttgstgctaggtcaaaggctgtgtgcattaattttttttttttttttttttttgagacagggtctcattctgtcacccaggctggagtacagtggcatgattat

SEQ ID NO: 53369 - DNA, 201 bp, Homo sapiens
ttctctttgaacagatgctggtaagtttcccattcccaaaatgttgcttcttcctgtgcatttatggacatggtgggctctttttggtgcataattcccarctagccctttattacaaagaattccaggcttaacatggaactttttaatattaaccctttaatcccataattagggactaaatatacaaataccagttca

SEQ ID NO: 53370 - DNA, 201 bp, Homo sapiens
cattatacatctttgcattcttgtttgagtgggttagatagtagaatggttgctgctaggtcaaaggctgtgtgcattaattttttttttttttttttttwtgagacagggtctcattctgtcacccaggctggagtacagtggcatgattatagctcactgcaatcttgaactcctgggttcaagcgatcctcctgcctc

SEQ ID NO: 53371 - DNA, 201 bp, Homo sapiens
gtgagtcctgggacaggtacccatgacatgggagactgtgcccttgtcttggacctgttttttttttgccaattttatgtaacattttatgtctgcatcarttctgtttcattccattatataagcctgttcactttttactgtcttatttagttaccgttcttacatacattttgcctggttaaattttcatgaagtatg

SEQ ID NO: 53372 - DNA, 201 bp, Homo sapiens
atagctcactgcaatcttgaactcctgggttcaagcgatcctcctgcctcagcccctcgagtagctggaatcataggtgtgcaccacgacacctggctaawttttttttttttttttttttttttttttttttttggtagagacggagtcttgccttgttgcccaggctggtctcaaactcctgggctcaaatgtcctcct

SEQ ID NO: 53373 - DNA, 201 bp, Homo sapiens
agcagccatgaaaccatggctttacatgcccctagcctttgccaagcaaggcctggcacgagtagagattcggtagttccgttagtaagtgtgtggggtgrgggtgaagagtgctcttccaagcctccatttcaaaacagcatttttttttttttttttttaagatggagtcctgctctgtcgcccagcctggagtgcagt

SEQ ID NO: 53374 - DNA, 201 bp, Homo sapiens
ataaaatttcttaaaacttttaagctaaaattgaaaagtaaagaataattactatgaacatattttactgtatttctccttttttttaacacgtttcttargatcaagaaaccctttttaaggaagtaaaagaattactgaaggaaaagagaaatagactaatattttaatgaattttaccactgattacaagataactct

SEQ ID NO: 53375 - DNA, 201 bp, Homo sapiens
agaatatgctggtgcagaaagattttcacggtcaaagtcaaccctttgtgtcatatgttaactcctaattatccccagctagtctcatttttagagcctcyttctagccatcccagctttagtgtgtgcctgtattactcttttctagaaacatatagactgaaatggtatcttttaagtccaaggtaccatctgccatta

SEQ ID NO: 53376 - DNA, 201 bp, Homo sapiens
ccaatgtggtgaaaccccatttctactaaaaatacaaaaattgggctgggcacagtggctcacacctgtaatcccagcactttgggaggtcagggtgggcrgatcacgagatgaagagatcgagaccatcctggccaacatggtgaaaccccgtctctactaaaaatacaaaacttagctgggcgtggtggtgcgtgcctg

SEQ ID NO: 53377 - DNA, 201 bp, Homo sapiens
tatcctactgtattggccttgaagatacaatttgtttagtcaggtttgctgagatataatttatatatagtaaaattcaccctttttatgtgtacagtatyatatggctgacaaatgtatacggccatataatcacagtcactccaaaaagttccttcatgttcatttgtcagtcctcctccttattgccaaaccctggca

SEQ ID NO: 53378 - DNA, 201 bp, Homo sapiens
ttcatctttaaagtatacaatcccattttttgtgtgtgtacagatgctccttgacttacaatagaattatgtcctgaaagccattgtgagtcgaaaatatygttaagttggaatgcatttaataacacctaacttaccaaacatctttcttagcctagcctaccttaaacatgctcgggacacttatattagcttacaatt

SEQ ID NO: 53379 - DNA, 201 bp, Homo sapiens
tagaaaggcaggtgtttttagtctaggttaatagttcttttcattaagaaaacatagactacattaacaaaaattaggcctcactgtcctggaactagacmaagaaaaagcagcattcactggaaattggaacagatttctgcccccgcctctatatttctatgtatatctccttcctcccaaaccctgttctctaaaata

SEQ ID NO: 53380 - DNA, 201 bp, Homo sapiens
agatggggtctcactttgttgcccaggctgcatagttcctgagagcattccattgttgtggagtagaagcacaccatgcagatcaaccataaaagtcccascaactcccctgcctgtaccccgtctccactacacacgctcacacatgcttccctctctttcccctccccagaggtaaccactgccactggactttattct

SEQ ID NO: 53381 - DNA, 201 bp, Homo sapiens
atattttcctgacgctcctcccatcttttaattgtggcgtgtcttccctttctgcttatttcacaaagtactatgtccctagtaccttagcacagttgtaygcacaattagattttaaatggattgaacttttggagcgggtggggagccggtcaccctcttctttcttcagcagaatctctgtttcactaccagaagcat

SEQ ID NO: 53382 - DNA, 201 bp, Homo sapiens
ttgaggtataattgacatacaaattgtttatggtatacaacatgatgttttgatatatgtatacattgtggaactaatgagtttaactctccagtgcttartttagctgtggggctgctgaggcactctgaaccaaatggaggagctgctacagtcttacctaatccttcagcactttttcctcagtggtcatggagaaca

SEQ ID NO: 53383 - DNA, 201 bp, Homo sapiens
tactggccctctgtttcctgtctctgcttctttcttgctgcagattccctaccccttcgcccccactgctctctctgtgggcagcggaaatacagcatacrctgctcacacagcactgagcccatgccaccctcctctaaacctgaggggccacaaaccttctgcaaatgaagaggtgttcacagagctgctgagtttgtt

SEQ ID NO: 53384 - DNA, 201 bp, Homo sapiens
tgaaagaataaatatactgtttcggatgatgctcctaaacctgtagtgatgctaattttaaaatttatttattaaaatgtgggccacatcagttgaataaracatgattttgccctcatgcaatttagtctggttcacagaaaaagttacaacaaatgatctgttaagaaggttctaatatagtcccggtgcggtggctca

SEQ ID NO: 53385 - DNA, 201 bp, Homo sapiens
agggctgcacacggtcaacaggtggcgtaatggaccttgcccagtttccagtacccgggtcaagcaaatgagggtggaatgtaggtcagctgcactggtgrtgctcagccagcaggtggcgctgggagcagtgagccccagccttggatctggcagcctatggactttttgggatttcacagtttcagatttcactatcct

SEQ ID NO: 53386 - DNA, 201 bp, Homo sapiens
gttgatattattgttaagaaacccagaactgctctgattcctttgtatatgacctgttttcatcctttctgtggaattttgtaggattttctttgtattcyggtgttttgaaatttcaccattatatgcctttgaataatctatttttgtcctttgtgctagagacttatccttcaatactgggaaattttctttatttcc

SEQ ID NO: 53387 - DNA, 201 bp, Homo sapiens
ctgcccctcatgtggagttgacctgcactatcgtgtctagtgaaggtcttttgaggctaggagtggtggcttctttactaatttgaagagtgggaattacwaaaaaaggcatcattagaggtttctacttcagagggacttaaatctatgttccctgtttcctggctgttgcattgtgtaggcccatttgatagttatact

SEQ ID NO: 53388 - DNA, 201 bp, Homo sapiens
tcgatcttggctcactgcaacctctgcctcccaggttcaagcgattctcatacctcagcctcccaagtagctgggattacaggcacccaccaccatgctgrgctaatttttgtatttttagtagaggcggtgttttcaccatgttggccagtctggcctcaacctcctggtctcaagtaacccacccgtctcagcctccca

SEQ ID NO: 53389 - DNA, 201 bp, Homo sapiens
tgctgagcataatggtgagtgagtggaaagctgggagacctgttccaacaagagctttctcatcccctgaccttaggccaaatcacaccctccctggtgtrtaggctttcaaggcttaaaagggaaattttgatcttctccctacctactctctgctcctggttcttatgaagtttgtaatacatcagaagcttcttgagt

SEQ ID NO: 53390 - DNA, 201 bp, Homo sapiens
caagtagctgggattacaggcacccaccaccatgctgagctaatttttgtatttttagtagaggcggtgttttcaccatgttggccagtctggcctcaacmtcctggtctcaagtaacccacccgtctcagcctcccagagtgccatgtttacaggtgtgagctaccgcgcccggccatatgtagccttttcagttcagct

SEQ ID NO: 53391 - DNA, 201 bp, Homo sapiens
tgggattacaggcacccaccaccatgctgagctaatttttgtatttttagtagaggcggtgttttcaccatgttggccagtctggcctcaacctcctggtmtcaagtaacccacccgtctcagcctcccagagtgccatgtttacaggtgtgagctaccgcgcccggccatatgtagccttttcagttcagcttctttctt

SEQ ID NO: 53392 - DNA, 201 bp, Homo sapiens
tcacttcttactttctaaaaaacaccttttctgtaggtttagtgaggtttcaagaaggagagaaattagatgttttggttcagtctgacatcttttacctsaaagttcctattaatctggattcctaagccagatttggatattttaaaaaaattcattctgtatttatgcttccttcagtatctatatttgtagttaaag

SEQ ID NO: 53393 - DNA, 201 bp, Homo sapiens
ggtttcaagaaggagagaaattagatgttttggttcagtctgacatcttttacctgaaagttcctattaatctggattcctaagccagatttggatatttwaaaaaaattcattctgtatttatgcttccttcagtatctatatttgtagttaaaggtataagtgctaatgtttagtggaggactcaatagaagggccagg

SEQ ID NO: 53394 - DNA, 201 bp, Homo sapiens
aatgtttagtggaggactcaatagaagggccaggaagtgagatatttaccacagccagcctaggacagtaagggtttggtttgggaccagaagagaattgmcagcaaacaaggagaatgatgaaagtggatgcatttagatgtaggtaggatgattagagacttaattttaagaatcttggatatctgagacctaatacat

SEQ ID NO: 53395 - DNA, 201 bp, Homo sapiens
ggccgcgggacccgggacaagaagaagggccggagcccagatgagctgccctcggcgggcggcgacggcggcaaatctaagaaatttgtgagtgtccctcycatcccgctcctgcctggccccgtaaccgccctctggacccctgcagccggcccctggggcgcctgcccggctttggggagccgcccccgcgccttcctt

SEQ ID NO: 53396 - DNA, 201 bp, Homo sapiens
gtagttcttttttttttttttctgtgtctaagattttatttttattttatttttattttttatttttatttattatactttaagttctagggtgtatgtgyacaacgtgcaggtttgttacatatgtatacatgtgccatgttggtgtgctgcacccgttaacttgtaatttacattaggtgtatctcctaatgctatccc

SEQ ID NO: 53397 - DNA, 201 bp, Homo sapiens
aatccttcccaagaatttcccgtttttcctattctgcttgcatttttcttttcggccacggggtgcgcgcagttgagctattttggctcaggttccagatkgtgaggtcagagactagggattggaggagaagatcaggtgactttcagtaacagagatggcggtcctcccatctccaccccttccccccctcatctttcc

SEQ ID NO: 53398 - DNA, 201 bp, Homo sapiens
ccatgtttccataatagtatttatagaaaacctccttttaggtcaagagatggagaccatcctggtcagcatggtgaaaccccatctctactaaaaatacaaaaaaaatcagctgggcgtgatggtgcgcgcctgtagttccagctacttgggaggctgaggcaggagaattgcttgaacccaggaggtggaggttgcaat

SEQ ID NO: 53399 - DNA, 201 bp, Homo sapiens
atagaatctgtaagaacacacatagtattaactaagtaaacaatacactctgaatatactgtagcagcaggtttctattttaataattgagcttgctgttygagtgttgtattggattctaaaaccgttttgcttgtactgactgggctgtgattcactttgctggttgttgctgccctctgttggactagctcaggaaat

SEQ ID NO: 53400 - DNA, 201 bp, Homo sapiens
atgttgggcaggccggtctcgaactcctgacctcaggtgatccacctgccttgacctcccaaagtgctgggattacaggcgtgagccaccatgcccggccragactgtttttgtttaaattattgtttgggacacatctcttaagttgtttttttgagacagggtcaaaaaaaaaagacagcctgtcacccaggctggagt

SEQ ID NO: 53401 - DNA, 201 bp, Homo sapiens
atagagtaatgaaagaataaatatactgtttcggatgatgctcctaaacctgtagtgatgctaattttaaaatttatttattaaaatgtgggccacatcakttgaataagacatgattttgccctcatgcaatttagtctggttcacagaaaaagttacaacaaatgatctgttaagaaggttctaatatagtcccggtgc

SEQ ID NO: 53402 - DNA, 201 bp, Homo sapiens
gggttcaagcagttctcctgcctcagcctcccaagtagctgggattacaggtgcccaccaccatgcccggctaatttttgtatttttggtagaggctaggkttcaccatgttggacaggttggtctcgaacttctgacctcaggtgatccacctgcctcggcctcccgaagtgctgggattacaggtgtgagccactccgc

SEQ ID NO: 53403 - DNA, 201 bp, Homo sapiens
tttcttatctttttgctgtactttttggggaatttccttaattcttccagtccttttattgagttttcatttctgttcttgtattttaaacttctaatgasctctttttcctctgaatgtttgttgtggatattaatgatttttagaacatctttcttcttgttgcatactgtttatttggcaagttgcttcccccagccc

SEQ ID NO: 53404 - DNA, 201 bp, Homo sapiens; identical to SEQ ID NO: 9685

SEQ ID NO: 53405 - DNA, 201 bp, Homo sapiens
tctggaattcatggtccattactggcaaaacctttttcactttgctctactggaaacctggttttctctcaataccactttcccttttgcttgcttatgtggttttgttttgttttgttttgttttgttttgttttgttttgtttttgagatggagtcttgctctgttgcccagactggagtgcagtggcaagctctcagt

SEQ ID NO: 53406 - DNA, 201 bp, Homo sapiens
ccctctcctagctggatatgaacctgaatgaggagaaacagcaacctttgagggagaaggacatcatcatcaagagggagatggtgtcccaatacttgtayacctccaaggctgtgagtcctgggacaggtacccatgacatgggagactgtgcccttgtcttggacctgttttttttttgccaattttatgtaacatttt

SEQ ID NO: 53407 - DNA, 201 bp, Homo sapiens
tggaattcatggtccattactggcaaaacctttttcactttgctctactggaaacctggttttctctcaataccactttcccttttgcttgcttatgtggttttgttttgttttgttttgttttgttttgttttgttttgtttttgagatggagtcttgctctgttgcccagactggagtgcagtggcaagctctcagttc

SEQ ID NO: 53408 - DNA, 201 bp, Homo sapiens
gttgtcttatttctttaatccaactcaaaggcatccctatggcagaggtcagagtgtataaggtgaaatgccgttctgtttttggaggggagtaggtaaayaggatgaagatgttagcaaacagaagtggcaatttaaaattctttctagtttcctggaagtatagatttagcaatagcactatccatcacaggaaggatc

SEQ ID NO: 53409 - DNA, 201 bp, Homo sapiens
ggaattcatggtccattactggcaaaacctttttcactttgctctactggaaacctggttttctctcaataccactttcccttttgcttgcttatgtggttttgttttgttttgttttgttttgttttgttttgttttgtttttgagatggagtcttgctctgttgcccagactggagtgcagtggcaagctctcagttca

SEQ ID NO: 53410 - DNA, 201 bp, Homo sapiens
cttggtccgaaatgactatgaggccaggtaagatgctgtgcttatgagaagttttgaatttgagcctaagtggagagagtgaattccttaaattcaaagaytgttctgtaaaaggaaaatgtaaagacaaagacccaagattagggttcattagtcaccgatataaaggaagttgtcttatttctttaatccaactcaaag

SEQ ID NO: 53411 - DNA, 201 bp, Homo sapiens
gaattcatggtccattactggcaaaacctttttcactttgctctactggaaacctggttttctctcaataccactttcccttttgcttgcttatgtggttttgttttgttttgttttgttttgttttgttttgttttgtttttgagatggagtcttgctctgttgcccagactggagtgcagtggcaagctctcagttcac

SEQ ID NO: 53412 - DNA, 201 bp, Homo sapiens
aattcatggtccattactggcaaaacctttttcactttgctctactggaaacctggttttctctcaataccactttcccttttgcttgcttatgtggttttgttttgttttgttttgttttgttttgttttgttttgtttttgagatggagtcttgctctgttgcccagactggagtgcagtggcaagctctcagttcact

SEQ ID NO: 53413 - DNA, 201 bp, Homo sapiens
gtatcagtatgcagagactttcctcattaaaaaaattataagtttttaataagcaggcattacttttataatgaacacaaggataaaacaaaagtagagtaatgaaataattgttcttttttttttttgaaacagtagctacagtaacccatttgatctgactgcatcttagcatgtatacatgtccttttgatcttccta

SEQ ID NO: 53414 - DNA, 201 bp, Homo sapiens
gggtttcaccatgttggtgaggctgatctcaaactcttggcttcaggtgatctgcccgcctcagcctcccaaagtactgggattacaggcatgagccaccrcgccctgcctgatattattcctcttaatgcttgagcctgagccatatttagttcagtcctgtattttgttcctgatgttagttacttatgcctgatttct

SEQ ID NO: 53415 - DNA, 201 bp, Homo sapiens
ggagtgccttcatacactgtaccccagctctcttctaaaagagaagtgggtgggcacactgaactgtttggtggccccaaccacaggaagctgcaattctstggcttagggtgatacttttgccctccttgtgcccctctcagctttccatccccagctaggaagaaagaatggcactcttgggcttggcccagaattaga

SEQ ID NO: 53416 - DNA, 201 bp, Homo sapiens
gggttcaagcaattcttctgcctcagcttcccaggtagctggggttacaggcgtgtgccatgacacccagctaatttttgtatctttagtagagacagggktttttcaccgtgttggctaggctggtcttgaactcctaaccttaagtgataggcccgcgtcagcctcccaaagtgctgggattacaggtgtgagccacca

SEQ ID NO: 53417 - DNA, 201 bp, Homo sapiens
ccatgacaacagacttgagctggcagaatgggtgacctggctctgggagcctccgcagcgcggaggaagccgcatacccttgctgaccagccagataaccscagtggctctgtctttgtgttcttgggtccttccgggtagttccccttttaagtcccccttcacccccagctccgtgttcttctgcagcttctctggctg

SEQ ID NO: 53418 - DNA, 201 bp, Homo sapiens
tgctgaccagccagataaccccagtggctctgtctttgtgttcttgggtccttccgggtagttccccttttaagtcccccttcacccccagctccgtgttyttctgcagcttctctggctgcagcaacctcggaatcccacagtgcttcgaggaggcaggcggagggggcggggagatgggagagcaggcgagtgagtgga

SEQ ID NO: 53419 - DNA, 201 bp, Homo sapiens
gttttgggagtgcagtttttgtctgtgaacattctcatacaactttttgggctggacatatgtcttcatttctcttgggtaagtacccatgagtggaatgrctgggtcatttggtagatctatgcttaattgagaaattgccaaactgttttcaaactgttttccaaactgttttcattttacattcttaccagcaatgtg

SEQ ID NO: 53420 - DNA, 201 bp, Homo sapiens
agtggaggactcaatagaagggccaggaagtgagatatttaccacagccagcctaggacagtaagggtttggtttgggaccagaagagaattgacagcaamcaaggagaatgatgaaagtggatgcatttagatgtaggtaggatgattagagacttaattttaagaatcttggatatctgagacctaatacataaataaa

SEQ ID NO: 53421 - DNA, 201 bp, Homo sapiens
ccagttttgggagtgcagtttttgtctgtgaacattctcatacaactttttgggctggacatatgtcttcatttctcttgggtaagtacccatgagtggartgactgggtcatttggtagatctatgcttaattgagaaattgccaaactgttttcaaactgttttccaaactgttttcattttacattcttaccagcaat

SEQ ID NO: 53422 - DNA, 201 bp, Homo sapiens
tattaactaagtaaacaatacactctgaatatactgtagcagcaggtttctattttaataattgagcttgctgtttgagtgttgtattggattctaaaacygttttgcttgtactgactgggctgtgattcactttgctggttgttgctgccctctgttggactagctcaggaaatgcagctttttttccctcgtggatca

SEQ ID NO: 53423 - DNA, 201 bp, Homo sapiens
tgctccaaccgccagggggcggtgctctccgccgcggccgcggagagctgcaccgcccactcaccacccccccccacgtgggtccgaatggttaggtccgmtgggcaggtagcgcgcttccgcggcttccctccgcccctctcccttcccccattggtaggggctgcgggtccgggcggaagtggggcaggcgggcgggag

SEQ ID NO: 53424 - DNA, 201 bp, Homo sapiens
tgtcttcatagggagctctagtggtggactttcagttcttgggctactgggcaggaaaagaaagacagatgatactcatgtaatagtaatggcactctcargtttgcttggcattttaggcctcttacccctagaacaataggaactggggtccttagagcaatagaactagaggatgtctgagttctctttttctcttca

SEQ ID NO: 53425 - DNA, 201 bp, Homo sapiens
caggctgtacagccacgtgggcgctgcgtgggagccagaggcctgcgctgctccaaccgccagggggcggtgctctccgccgcggccgcggagagctgcascgcccactcaccacccccccccacgtgggtccgaatggttaggtccgctgggcaggtagcgcgcttccgcggcttccctccgcccctctcccttccccca

SEQ ID NO: 53426 - DNA, 201 bp, Homo sapiens; identical to SEQ ID NO: 9686

SEQ ID NO: 53427 - DNA, 201 bp, Homo sapiens
gtctgggatgtgagagggtccaggctgtcaggctgtacagccacgtgggcgctgcgtgggagccagaggcctgcgctgctccaaccgccagggggcggtgytctccgccgcggccgcggagagctgcaccgcccactcaccacccccccccacgtgggtccgaatggttaggtccgctgggcaggtagcgcgcttccgcgg

SEQ ID NO: 53428 - DNA, 201 bp, Homo sapiens
cccggaatgggtatgcctccacctcccccatttggatttggagttcctgcagccccagttctgccatttggattaacccccaaaaagctttataagccagwggtgcagctccggaggccaaactggtccaaggtaagagtttctgtctatttcttcaccagtcaatcttttttttttttttttttttttgagacggagttt

SEQ ID NO: 53429 - DNA, 201 bp, Homo sapiens
ccggaatgggtatgcctccacctcccccatttggatttggagttcctgcagccccagttctgccatttggattaacccccaaaaagctttataagccagargtgcagctccggaggccaaactggtccaaggtaagagtttctgtctatttcttcaccagtcaatcttttttttttttttttttttttgagacggagtttc

SEQ ID NO: 53430 - DNA, 201 bp, Homo sapiens
atctaccgactttcttcagattttaccaattgtcacaataatgtcctttatagaaaaaagtcctggatcatgtactgcattcatttgtcttttatctttartctcatttaattgggaacagttcctgttatggtcacctgcaagggcattatagacccccacttaaaatttggtttggatgttaagactattcgtgttaca

SEQ ID NO: 53431 - DNA, 201 bp, Homo sapiens
cccgcccccgcccgcgccggggtctcctcttctgcctggagacagccgcaagcttagactgcacactccactgcacactgacacgccgcactcagatcccyacccccacagcggaccgatcacacaatggcacacggtacacagatccataggcacacaatcgcacactgtctcataggcacaacggcattgcaagcatac

SEQ ID NO: 53432 - DNA, 201 bp, Homo sapiens
tggagatttaagagtggcttgggatgctgtgtcccaaggaatttcttttcacctcttggttgggctggagggaaaaggagtggctcctagagtcctggggktcaccccagggcttttgctgactctgggaaagagtctggagaccacatttggttctcgaaccatctacctgcttttcctctctctcccaaggcctgacaa

SEQ ID NO: 53433 - DNA, 201 bp, Homo sapiens
gttgtctactcatgtttaagaatgagggattacaaagcagattggaaactctaggtgcgtgggtaggatttgaaagctggttgctttgctgtaggacagcrccatccaatagaaatctaatgtgaatcacattgtaagtttagattttctagttttagaaacgtgaaattaatatatctaaaatattacttcaatatgaat

SEQ ID NO: 53434 - DNA, 201 bp, Homo sapiens
actgtctcataggcacaacggcattgcaagcatacacaaccatattgcacagtcacacacacacacgcaattcggaaacatctagacgcgcaatgacacaragtggcctcccgattccgcccttcttccagcacccacctcagctcatcacttcatgcacacatgccaggagcttccatcgcttatacagaaacgttcagc

SEQ ID NO: 53435 - DNA, 201 bp, Homo sapiens
gctcacgcctataaatcccagcactttgggaggccgaggtgggcagatcgcttgaggtcaggagttccagaccagcctggccaacatggtgaaaccccatrctaaaaatacaaaaattagccacgtgtggtggcatgcgcctgtaatcccagctactcgggaggcttgaacctggaagaaggttgcagtgagctgagatca

SEQ ID NO: 53436 - DNA, 201 bp, Homo sapiens
atacactgagataaaacatgttaagtgcttagcacagtgcctgacagaagaagttgcccattatctgtctatgtgaagaacaatgctaaatactgtagtakccacaaacatgaacctttctctagaagagtttacattccagtcagtagtatgataaatattgtagcagatacagactgatacaagaaagaggactgatag

SEQ ID NO: 53437 - DNA, 201 bp, Homo sapiens
gtgccagatatttctatttttcaaaagaagtcagcaatccgtaattttaaaaaaataataaatcttgaataacataaaatatcctagtcactatttgaatwtccccaattaggtcatttttttaaaaaccagtttgttcaaatcacaattccaaatatagtccactgtactggtattctcaattttcatttaaactatagg

SEQ ID NO: 53438 - DNA, 201 bp, Homo sapiens
aagtcacagaaacttcagattaattttgctgcttgcagaagaaacagaatacatccccccatccatatttttctcaattcaaataacattctggaattatyagggctaaatttgtgcacaccaaggtactaggcttggacacatggttgttatatatgtagaaagatcaagcagagcctttccccaaacatacatcagatt

SEQ ID NO: 53439 - DNA, 201 bp, Homo sapiens
gccatcaaaatcagtgtaaacttcctagaatgtgatagcttagcttactaagatgtagaactggcttttagagatgtttggactgacagagggagtaattkagttacctgttaatattttcagtaagtgactttgaggcagttacctcttattttctgtctactgcctgatcttcaagccaagtacttactaggaatcctc

SEQ ID NO: 53440 - DNA, 201 bp, Homo sapiens
ggtagatctatgcttaattgagaaattgccaaactgttttcaaactgttttccaaactgttttcattttacattcttaccagcaatgtgtaaaagttccartttcctgtcaactgttagtatgatcagtcttaaattttagccattctagtgggtatgtgatgatatctcagtatgctttatttatttatttatttattta

SEQ ID NO: 53441 - DNA, 201 bp, Homo sapiens
ctcttcttcttttcagatcaaatgattgataagacaaaggtggagaaatctgaagccaaagctgcagagctggaaaagaaggtgcatatgagagaccaaaracatgtgtttgagtatatctttctttgagaattattattttcctgatctatgagacagttttcctctgtggtattttggaagcgtttagcacccaatagt

SEQ ID NO: 53442 - DNA, 201 bp, Homo sapiens
taatggtgtgaacttaggtagtgctagtagacatggatggaagagagacgaatcaagagtctgtaggcagaaagaacaggttgctggttaccccccaccctttttttttttttaaacttaagcttcagctgtgaacaattcagctgccattaattctttagacgcaggttctgttatctacattacatctatcttagagtt

SEQ ID NO: 53443 - DNA, 201 bp, Homo sapiens
attgtgtaatgccagtcttcctgtttctaaatattaatgaatgtttagcatctttatagataaggaaaattaattcattccagactaggatagggaataayaacagtagcagtaataaaagcagttgtttgttgcatacttaactgtatccctagtgcagtgctaaagagccttagatttattatctcattaatctctaca

SEQ ID NO: 53444 - DNA, 201 bp, Homo sapiens
ttccacatgttcactttgggatataaattgtcacctgtggtcaacagagaacatttctgatactctgaggatttcgggactttcattccatttatcgtggragcatttttttcttgttaggtggtggtgttagcaaccttttgttttcctgtattcagtatactacagattgtgtaatgccagtcttcctgtttctaaata

SEQ ID NO: 53445 - DNA, 201 bp, Homo sapiens
ccagctaatttttgtatctttagtagagacagggttttttcaccgtgttggctaggctggtcttgaactcctaaccttaagtgataggcccgcgtcagccycccaaagtgctgggattacaggtgtgagccaccatgcctggctcacatcccttaagtcttgataggaagtgtattcgtttgctagggctgccgtaagaga

SEQ ID NO: 53446 - DNA, 201 bp, Homo sapiens
gtcacaggggacttggctatttgctctgaaggagaaagtagcagttaaatgtaaagttgtgggctaggggaatgtactgttagccaagaaggggtttatcrtagtggtggctagaggatgaatgatgattatagatacaggaaagggaggaggaacttaaatttcatgttggataagttcaatacataccacagaatatta

SEQ ID NO: 53447 - DNA, 201 bp, Homo sapiens
aggcaggtggatcacctgaagtcaggagttcgagaccagcctggccaacatggtgaaaccccgtctctactaaaaatacaaaaattagccaggcatggtgrtgggttcccgtaatcccagttactcgggacgctgaggcaggagaatcacctgaacccaggaggcggaggttgcatggtggtgggtacctataatcccagt

SEQ ID NO: 53448 - DNA, 201 bp, Homo sapiens
tgatgaaagtggatgcatttagatgtaggtaggatgattagagacttaattttaagaatcttggatatctgagacctaatacataaataaagctccagtarcatttatctccctggactcctgtgtttttgttgttgttgttgttgttgttgttgttgttgttaacttgtcatgatctaggaacttattctatatttcaga

SEQ ID NO: 53449 - DNA, 201 bp, Homo sapiens
ggagaaagtagcagttaaatgtaaagttgtgggctaggggaatgtactgttagccaagaaggggtttatcatagtggtggctagaggatgaatgatgattrtagatacaggaaagggaggaggaacttaaatttcatgttggataagttcaatacataccacagaatattagtctcccagcactggttctttttcaatctg

SEQ ID NO: 53450 - DNA, 201 bp, Homo sapiens
ttgggaggccgaggcgggcagatcacgaggtcaggagattgataccatcctggctaacacagtgaaaccctgtctctactaaaaatacaaaaaattagccragtgtggtggtgggtgcctgtaatcccagctactcaggaggctgaggcaggagaatggcgtgaacccaggaggcggagcttgcagtgagccaagattgcg

SEQ ID NO: 53451 - DNA, 201 bp, Homo sapiens
gtagcagttaaatgtaaagttgtgggctaggggaatgtactgttagccaagaaggggtttatcatagtggtggctagaggatgaatgatgattatagatayaggaaagggaggaggaacttaaatttcatgttggataagttcaatacataccacagaatattagtctcccagcactggttctttttcaatctggaaataa

SEQ ID NO: 53452 - DNA, 201 bp, Homo sapiens
aagtgtggtggtgggtgcctgtaatcccagctactcaggaggctgaggcaggagaatggcgtgaacccaggaggcggagcttgcagtgagccaagattgcrccactgcactccagcctgggtgacagagcgagactctgtctcaaaaaaaaaaaaacaaaaaaacagccaggcatggtggctcatgcctgtagtctcagct

SEQ ID NO: 53453 - DNA, 201 bp, Homo sapiens
tgtcaaccttactgaatgattaattcttgtagttcttccttgggttgtcttgaattgctatatatagtcatatcttccacaaaaatgacattttcatcccttttttttttttttttttttttttttgagacggagttttgctctttttgcccaggctgcagtgcaatggcgcgatctcagctcaccacaacctctgcctcc

SEQ ID NO: 53454 - DNA, 201 bp, Homo sapiens
ggtacctattagggatgagatacagacaaggatagctatctgggacattattggcagtgggccctggaggccagtccctagccccccttgccccttatttyttccctgcttccctcgaacccagagatttttgagggatgaacgggtagacaaggactgagattgcctctgacttcctcctcccctgggttctgacttctt

SEQ ID NO: 53455 - DNA, 201 bp, Homo sapiens
caccacgcctggctagtttttgtattttttgtggagatgaggtttccccatgttgcctaggctggtctcaaactctggggctcaagcgatccgcccacctyggcctcccgaagtgctgggattacaggcatgagccactgtgcctggcctaaaagagccctgttaggaagattatccagcataggtttgcaggatgggttg

SEQ ID NO: 53456 - DNA, 201 bp, Homo sapiens
taaaattatttcattttgcatggggcctagagggatatttttagttttcttagtttttgtgaaagatgtgtgtcaggcttagaggtctctagtgatttctytcttgattcttgtatttttaaaagatgggagttggtcttagttggcagctctttgcatccgccagggctgttcgttacttacttctaggtctgtgggtga

SEQ ID NO: 53457 - DNA, 201 bp, Homo sapiens
cgatttttggtctgggatgtgagagggtccaggctgtcaggctgtacagccacgtgggcgctgcgtgggagccagaggcctgcgctgctccaaccgccagrgggcggtgctctccgccgcggccgcggagagctgcaccgcccactcaccacccccccccacgtgggtccgaatggttaggtccgctgggcaggtagcgcg

SEQ ID NO: 53458 - DNA, 201 bp, Homo sapiens
aattagtttgtcctgattagaaacaattagatggtacctaacctggaattcgaactaggaaattaaactccagagcgagtctggtttagtctagtgcttgscctggaccgagctctgttcttgctaccttgctttcaaaacatggtggctatcactataatttttttcatgtgttccatgggtattgcacacattgaaaac

SEQ ID NO: 53459 - DNA, 201 bp, Homo sapiens
atttgctttagagaggatggagctgaaccaagttctcttttctttctgcggtgttagtcttaacccttaatctgctgaatttttaaaactaaatagctcargtaatgaggaaaattgcattagtagctacggaattggaaggtttctaggaaagtagtgctgcttaacccttttattgccaaatgtaacctatctcaaggc

SEQ ID NO: 53460 - DNA, 201 bp, Homo sapiens
ggctctggctccctaacacctgaatcccagatgatgggaagtatgttttcaagtgtggggaggatatgaaaatgttctgttctcacttttggctttatgtycattttaccactgtttttatccaataaactaagtcggtattttttgtacctttcgcctttctaggaatgttaattcttgctagtttcctatttatgaaag

SEQ ID NO: 53461 - DNA, 201 bp, Homo sapiens
tgcctcagcctcccgagtagctgggattacaggcatgcgccaccatgcccagctaattttttgtatttttagtagaaatggcatttcaccatgttggccasgctggtctcgaactcctgatctcatgatccgcctgccaaggcctcccaaactgctgggattacaggcatgagccactgcgcctggtggacagttagacta

SEQ ID NO: 53462 - DNA, 201 bp, Homo sapiens
ttcatctttctatctttaagcttcactcatgcttatgtttattcaggagatattaggcatcttctttattccatacatcaccacggagagttctgtgaacsctgtattctgaatttaatcttaacttaatgttttttgccttttctctgaggctgtgaataccatggtaacacacagtttgataatagtcattcaccagtc

SEQ ID NO: 53463 - DNA, 201 bp, Homo sapiens
aatgttgaattttatgttctatgaacatcatgtatctttccatttatataggtctttgatttctctcatcagtgttttgtggtttttagcatacagttggrtcacgtaacttttgttcacataactgaaatgtaactgaagtgtttctttctcttttctatttatttatttgcttttgtcttatggtactttatttctctt

SEQ ID NO: 53464 - DNA, 201 bp, Homo sapiens
tgggtgacacagtgagatgctgtctcaaaaaacaaacaaaaaagatggagcttgaaagataagttggatttttaaataggcacaaaaggaaggataacatkgtggaaggggactgctgaactactactaaccaactgttcttgtgaatcaagttttaatggaacacaaccatgcccattcatttatgtattgtctgtgcct

SEQ ID NO: 53465 - DNA, 201 bp, Homo sapiens
gtccaaaaaggcgcttcattccagtcatgcagctgccccagtcttggtctttatttaggagtgctcggctctttcatctggtcctgcttctaaaacattcyggtactgctttctccactccagctttcccagatctccaggaagtctttttttttttttttttttccaattgagctatcatttacatacctaaaattcacc

SEQ ID NO: 53466 - DNA, 201 bp, Homo sapiens
tggtagaggctaggtttcaccatgttggacaggttggtctcgaacttctgacctcaggtgatccacctgcctcggcctcccgaagtgctgggattacaggygtgagccactccgcccagccaaaccttgattttaaggtcagaatcatggtgcttttttcccccgagcatggcctggatttatgagctctgtaaatcaagt

SEQ ID NO: 53467 - DNA, 201 bp, Homo sapiens
tcggctctttcatctggtcctgcttctaaaacattccggtactgctttctccactccagctttcccagatctccaggaagtcttttttttttttttttttyccaattgagctatcatttacatacctaaaattcaccttttaaaaatgtataattcaggggttttagaatatccacaagattgtataaccattactatcta

SEQ ID NO: 53468 - DNA, 201 bp, Homo sapiens
ccaaggcgtttgcccggcgccaacccgcccccgcccgcgccggggtctcctcttctgcctggagacagccgcaagcttagactgcacactccactgcacaytgacacgccgcactcagatccccacccccacagcggaccgatcacacaatggcacacggtacacagatccataggcacacaatcgcacactgtctcatag

SEQ ID NO: 53469 - DNA, 201 bp, Homo sapiens
ttggtctggctgctctcgaactcctgaccttgtgatccgcccaccttggcctcccagagtgctgggattacagacgtgagccaccacacctggcctacatrggccatatttgcatgcacagtattgttcccatgatgtgtttgagatgcctgtgattctgagtgagttagcctttttcttctagaaaccaagttaatataa

SEQ ID NO: 53470 - DNA, 201 bp, Homo sapiens
ttgaccacgctgagcactgggaatataggggtcaccaaggtagtctctcttcacaagagttgagggtagaggttaagaggctctggagtgagaaagtctargtttgattcctagctcctttccttactcactgtgatcctgggcaagtctacctaacctccttatgccacttcagttttctcatctgcaaaatggggatga

SEQ ID NO: 53471 - DNA, 201 bp, Homo sapiens
gagtcttgctctgttgcccagactggagtgcagtggcaagctctcagttcactgtagcctctgcctcctggtcacaagcaattctcctgcctcagcctccygagtagctgggattacaggtgtgcaccaccacacctggctaatttttgtatttttagtagagacagggtttcaccatgttggccaggctgctctcgaact

SEQ ID NO: 53472 - DNA, 201 bp, Homo sapiens
ggcctgagaaatggctttggaaaagggtgctgggagaagattagaacttagagtgagatcctgacctctctccccttgctttgcaggccagaggcacccartgagttctatgatggagaccatgacaatgacaaggaaagcgatgtggagatttaagagtggcttgggatgctgtgtcccaaggaatttcttttcacctct

SEQ ID NO: 53473 - DNA, 201 bp, Homo sapiens
tttaagcgcataatagaacctacccacattatatatggataactagcttgagataacatactgaatccatttcttcagggaattcccctggtctaacttgratagaatatgctggtgcagaaagattttcacggtcaaagtcaaccctttgtgtcatatgttaactcctaattatccccagctagtctcatttttagagcc

SEQ ID NO: 53474 - DNA, 201 bp, Homo sapiens
ttaatctacttttgctaagatgcatttaataaaaaaaaagagagagagagagaggtgtgagggacaaaatgcaaacctatttcccttgcctcataggcttytgggatgtcatcacctccagtttgttggttttgtttccaactgttaataaagcattgaaacagtactgccttacagcttcctgtgtgaatttctgagctg

SEQ ID NO: 53475 - DNA, 201 bp, Homo sapiens
tagtttccaggatgtcaggcaactccccactcctccatttcctgtttgtggtcttcattgagagacgccttaaacaggaattcctggggaagtgcaggctrtagcggtgggattccgggggtcattagtccattattgaagctggggaatcatgtactataaaaggacctcccttccgttctgttgtctcctagaaactat

SEQ ID NO: 53476 - DNA, 201 bp, Homo sapiens
ggaggtgagctgagattgtgccactgcactccagcctgggcaatagagtgaggctctgtcttgaaaaaaaaagaaaagaaagaacagggaaaggagattcrtttgggcttttattgtggttaggggcttgggctggggtgagagttcttacacaagagcggactttacctagtttggatttcttgctgattcccaaggaag

SEQ ID NO: 53477 - DNA, 201 bp, Homo sapiens
caggagtcagcaaactacggccaacatgttttgttaataaggttttattggaacacagccattctattgtcattgtcaatgactattttcatattatgccrgcagagttgagtagttgcaacagaaactattaatatatggtccacaaagcctaaaatatatgtctgtttatggaatttcttttatttctttatttgctta

SEQ ID NO: 53478 - DNA, 201 bp, Homo sapiens
aaattagctgggcgtgtggcaggcgcctgtagtcccagctacttgggaggctcagacagaagaatcgcttgaacccgggaggcgtaggttgcagtgagccragattgtgccacttcattctagcctgggcgatatagcgagactccgtctaaaaaaaaaaaaaattagccaggcatggtgtcatgtgcctgtaatcccagc

SEQ ID NO: 53479 - DNA, 201 bp, Homo sapiens
tgtgccacttcattctagcctgggcgatatagcgagactccgtctaaaaaaaaaaaaaattagccaggcatggtgtcatgtgcctgtaatcccagctactygagaaggaggctgagacaggaggattgcttgaacccaggaggcggaggttgcagtgggctgagatcatgtcactgcgctctagcctgggtgacagagcaa

SEQ ID NO: 53480 - DNA, 201 bp, Homo sapiens
tgccatcccgcttgccagctgcgttggtcagtgtggcattgctgcctgggatgtagacattctggcggtagtcgggcacgtgctgcagggtgaactggggyccgtagcgggcgctcaatcccatggtgccggcaccccctcccagggtggagctcccatcagcagcttctgcagagacagaggaagatcaggtgggagcta

SEQ ID NO: 53481 - DNA, 201 bp, Homo sapiens
ctaaaatttactcatctgctagatggggctgttgttcctaagaaccttgtttgcaagattaaaaatgggaaaggggtagagaataaagggacctcactgaytatgtcttctatatacaggagttacgatagccggaacaagcatgagatcattcgctgcttgaaagcttttatgaacaacaaggtgagatttttcccattc

SEQ ID NO: 53482 - DNA, 201 bp, Homo sapiens
gcttatatcctcttaaaacattaactttaatccaaaagtttgcagaaaactgaaaaatatacagagagctttgcaaaagtttgcagaaaactgaaaaatayacagagcgctttgtacacctttttttttttttaacagatgatgaacgcaaggattatatagtttggaaagagggaggggagcctacaggaacgttagtga

SEQ ID NO: 53483 - DNA, 201 bp, Homo sapiens
gtacagctagaggtactattactcctgtattttgtctttataggttcttacaacattatttcctactgaccacacaaggtgatgtggccttaacattaagyatttctagccttacaaaaatacattgcatcttattgttttttttttttttttttttgaccccgtcggctaagtgcctgcatcagaattttggtggggaat

SEQ ID NO: 53484 - DNA, 201 bp, Homo sapiens
ggcacagtcatggctcactgcagcctcaacctcctgggctccagtgatcctcctacttcagcctcctaagtagctgggactacaggcatgtgccaccatgcccagctaaatttttttttaaatggagacagggtctcactatgttgcccaagcttgtctcaaacacctggactcaagtgaccctcccacctaggcctccta

SEQ ID NO: 53485 - DNA, 201 bp, Homo sapiens
aaagcccacaccaagtatccttcaccttcccctgggactccagggtttgtccccaggtactggctaggatgcagtgggggaaggtggagtcccgctgacaygtgggatgagggctgcacacggtcaacaggtggcgtaatggaccttgcccagtttccagtacccgggtcaagcaaatgagggtggaatgtaggtcagctg

SEQ ID NO: 53486 - DNA, 201 bp, Homo sapiens
tataggttcttacaacattatttcctactgaccacacaaggtgatgtggccttaacattaagcatttctagccttacaaaaatacattgcatcttattgtkttttttttttttttttttgaccccgtcggctaagtgcctgcatcagaattttggtggggaattcccttttaagcctcttcctgtggaactatactagaat

SEQ ID NO: 53487 - DNA, 201 bp, Homo sapiens
tgatcttgggctctggaaggaggtgaaggggctggcaccaaaccatgctttgggggaagattgagaatcaaaggagaggccaagaggtcatgatgcccttscaacttttcagaactaggaggcttgtaggttacttggtacttcaacaccccaaccaccttactcgggaaagaggaactgttggagtggggtggggaggag

SEQ ID NO: 53488 - DNA, 201 bp, Homo sapiens
gccttaacattaagcatttctagccttacaaaaatacattgcatcttattgttttttttttttttttttttgaccccgtcggctaagtgcctgcatcagamttttggtggggaattcccttttaagcctcttcctgtggaactatactagaatcccagatgcttcctgtccacaggtagccagacatcagtggcttccctc

SEQ ID NO: 53489 - DNA, 201 bp, Homo sapiens
ttccaatcaaggggggagaaggtgtatcacaaggcggaagtgggagctagagagatgccaggctcttttaaacaaccagtgcttgtatgagctcattactrtggggagggcaccaagccactcataagggatccaccccatgacccaagtgcctcccactaggccccacctccaacattgtagtccacatttcagcatgag

SEQ ID NO: 53490 - DNA, 201 bp, Homo sapiens
ccatatcacctcctatctagagaaggttgctaagaatatttcctgtaccactgcttattctcccccctacttttgtaaataggacaagaaacataattagsagagtttgagacaagaatgagttatttagtgtgatgatgattgccccatctgtcctagtttcctcttccctaaggaagcttaatgtattaacaagagcac

SEQ ID NO: 53491 - DNA, 201 bp, Homo sapiens
gccagatatggtggcacatgcttatagtcccagctactagggaggctgaggtgggtggatcacttgagcctgggaggttgaggctacggtgagctgtgatygcgctgctgcactccagcctgggcgactgagattccatcaaaaaaaaaaaaaaaagacgggctatctgatcctgtttggcttctgcctacctaaagcttt

SEQ ID NO: 53492 - DNA, 201 bp, Homo sapiens
atatataattaaaatacaataaactgcatatttattcatgaaaccatttctatagtcaagataatgaatatagcagtcaccttcaagtttcctccttctcyctttgttatccctccctctcacccatcctcgtcctcccatctccagattaccactaattttctttctgtaactatagattagtttgtgttttctagaatt

SEQ ID NO: 53493 - DNA, 201 bp, Homo sapiens
ggagcatggccttggcccctaccagtattctgggggttagccctgaaactctgaggcctgggtgcaggtaaggagaagctgggctggttggggagaggccrccctgtggctcttggcctggcctccatgttacttcttctccttcttgcccgacttcttcttgttgccattgccacctgctggggccttgccatcccgctt

SEQ ID NO: 53494 - DNA, 201 bp, Homo sapiens
atcctgaatgttccactggtcatcagaggtatagcaaaatgtctcctatatctccattaatatctgtattgtctaggatgagggtttctttttactattctttttttttttaattcagaagtggcacaatgttatttttaaaactcaaacgatatagaagtatataaagtaaaatttaactgcctcatccctttgccaaat

SEQ ID NO: 53495 - DNA, 201 bp, Homo sapiens
aagtaactttctttctttcttttttttgagacggagtttcgctctttttgcccaggctggagtgcaatggcatgatctcagctcaccacaacctctgcctyccgggttcaagcgattctcctgccttagcctcccaagtagctggattacaggcatgagcctccacgcctggctaattttttttgtatttttagaagagat

SEQ ID NO: 53496 - DNA, 201 bp, Homo sapiens
cttcttcttgttgccattgccacctgctggggccttgccatcccgcttgccagctgcgttggtcagtgtggcattgctgcctgggatgtagacattctggyggtagtcgggcacgtgctgcagggtgaactggggtccgtagcgggcgctcaatcccatggtgccggcaccccctcccagggtggagctcccatcagcagc

SEQ ID NO: 53497 - DNA, 201 bp, Homo sapiens
gtgcacgggtcagaataattttatttcctgtgtcttagaatcaccttttgttattccccaaggcccttggtattttataaatgtattgccaggctattctyagggagtgttatatatcttccatgaaatgtaatagagatttaaaagataagttgtatgtcacatatgatttagaagaacaggttaaaataatttttattg

SEQ ID NO: 53498 - DNA, 201 bp, Homo sapiens
ggattgaacttttggagcgggtggggagccggtcaccctcttctttcttcagcagaatctctgtttcactaccagaagcatgtctttgttgaaacatatgrtttcaattactggccctctgtttcctgtctctgcttctttcttgctgcagattccctaccccttcgcccccactgctctctctgtgggcagcggaaatac

SEQ ID NO: 53499 - DNA, 201 bp, Homo sapiens
ttgaaacaaactttgtattacttaagtggttttcttttttcattgagcctccttttctcaattacctttgtttgaaagcagtaggcaaaaaattcattttrtgctaccagcaaagcattggatgtttgcccctccttggggttaggtgagacaaagccacactctccccttgcctggctgcctgtcacctcctccctgtgt

SEQ ID NO: 53500 - DNA, 201 bp, Homo sapiens
ccagtctgcaaactactgataattgtgctgatcccaaagtcatggatttatgaatccactctcctatcccaattccgcaggatgtgagttacacaggccatttttttttttttttttgagttggagtcttgctctgttgcccaggctggagtgcagtggcataatctctgctcactgcaacctcagcctcctgagtagcta

SEQ ID NO: 53501 - DNA, 201 bp, Homo sapiens
ccacagagaaacaggacctggaagcagaggtgtcccagctcacaggagaggtaatgcctgagcagggaaggcagaatgacctgtaacctcaggatgcacakggcttggaacaggagtcagtcatctcgctcctagggagggttcagctactaataggtaatctagttacatggtgcatattttaaaaataatatactggtt

SEQ ID NO: 53502 - DNA, 201 bp, Homo sapiens
tggggtggggaggatggcattgcgggaaaatatcccaaggtctgcattggataataggcaatgagatcttttgttttaaccattttttagcagatacaagyaaacatgagcgtgtgagacttaaggctgagctctctttgcctcttcttagctgccagctgctgtgggagaggggaaatcaagcaatagccattcattttg

SEQ ID NO: 53503 - DNA, 201 bp, Homo sapiens
aaatcaagcaatagccattcattttgtgtggggcttgatatttgccatgctgctctggctgaagagttcacatctccatcttgttctttataacagagggygatgagacaggtgtgatggacagtcttctagaagccctgcagtcaggggcagcattccgacggaagagagggccccgtcaaggtaagtaagcacatggag

SEQ ID NO: 53504 - DNA, 201 bp, Homo sapiens
ttattagtaagctcttgctgtctgtttttatggtttttttttttttttttttttttagtttctgctgaaaacttgcaaaagaacctagatcagatgaagamacaaatttctgatgtggaacgtgatgttcagaatttcccagctgccacagatgaaaaagacaagtttgttgaaaaaatgaccatatcctctcttgaaagg

SEQ ID NO: 53505 - DNA, 201 bp, Homo sapiens
gggagcatggccttggcccctaccagtattctgggggttagccctgaaactctgaggcctgggtgcaggtaaggagaagctgggctggttggggagaggcygccctgtggctcttggcctggcctccatgttacttcttctccttcttgcccgacttcttcttgttgccattgccacctgctggggccttgccatcccgct

SEQ ID NO: 53506 - DNA, 201 bp, Homo sapiens
aggtatagagatttccaatatatcgctgcccacacacgtgcatggtgtatcaatccgttctcacactgctatgaagaaatacctgagactgggtaatttayaaaggaaagaggtttaattgactcacagttctgcattgctgggaaggcctcaggaaacttacaatcatgatggaaggcaaaggagaagcaggcaccttct

SEQ ID NO: 53507 - DNA, 201 bp, Homo sapiens
aaaacttaagtatgtgacacaactaaagtacataaggaactaaaattattaagtaccagaatgtgtgtatagactgaagctatgctctgaaaggtgaaacyaaggggtgttgaggctgggattattagtaagctcttgctgtctgtttttatggtttttttttttttttttttttttagtttctgctgaaaacttgcaaaa

SEQ ID NO: 53508 - DNA, 201 bp, Homo sapiens
gcgcatgctggaagggacagtcagtcaccatcaccaccagcagcttggaccttatccctgttctgagtgaatgggaggtagagagaagatggagaagagcycggctctatgaagctgaggagatgatgatctcggggactagacatctcagggacactttaggcacaggctcagagtgccacagctaggtgacatcagaca

SEQ ID NO: 53509 - DNA, 201 bp, Homo sapiens
gtttcactggaaagatgaaaacttaagtatgtgacacaactaaagtacataaggaactaaaattattaagtaccagaatgtgtgtatagactgaagctatrctctgaaaggtgaaactaaggggtgttgaggctgggattattagtaagctcttgctgtctgtttttatggtttttttttttttttttttttttagtttct

SEQ ID NO: 53510 - DNA, 201 bp, Homo sapiens
tggtggcacattcctgtaatcccagcaggaagctgaggtgggaagattgcttgagaccaagagttcaagaccagcctgggaaacaaagcaagacccctgtytctacaaaacataaaatactagctgagcacagtggcgtgtgccagtagtcaactactcaggaggctaaggcagaaggatcacttgagcccaggaatttga

SEQ ID NO: 53511 - DNA, 201 bp, Homo sapiens; identical to SEQ ID NO: 52614

SEQ ID NO: 53512 - DNA, 201 bp, Homo sapiens
tcaaagctgcagtagccatgtttgtgccactgcactccagcctggataacagaacgagaccctgtctccctgtctcaaaatattaatgtgtgtgtgcgtgygtgtgtgtgtgtgtgtgtgtgtgtgtgttttggtctccatcctggctcctggccagacctcctaaagcccttgtaatttcctaaatgataaagtgaaggg

SEQ ID NO: 53513 - DNA, 201 bp, Homo sapiens; identical to SEQ ID NO: 52495

SEQ ID NO: 53514 - DNA, 201 bp, Homo sapiens; identical to SEQ ID NO: 52496

SEQ ID NO: 53515 - DNA, 201 bp, Homo sapiens; identical to SEQ ID NO: 52627

SEQ ID NO: 53516 - DNA, 201 bp, Homo sapiens; identical to SEQ ID NO: 52628

SEQ ID NO: 53517 - DNA, 201 bp, Homo sapiens; identical to SEQ ID NO: 52630

SEQ ID NO: 53518 - DNA, 201 bp, Homo sapiens; identical to SEQ ID NO: 52632

SEQ ID NO: 53519 - DNA, 201 bp, Homo sapiens
cactttgggagggcgaggtgggcgaatcatgagatcaggagttcaagaccagcctggccaacatagtaaaaccccgtctcactaaaaatacaaaaaattakccagctgggcgtggtggcaggtgcctgtaatcccagctactctggaggctgaggcaggagaatcacttgaacccgggaggtggaggttgcagtgagtgga

SEQ ID NO: 53520 - DNA, 201 bp, Homo sapiens; identical to SEQ ID NO: 52501

SEQ ID NO: 53521 - DNA, 201 bp, Homo sapiens; identical to SEQ ID NO: 52502

SEQ ID NO: 53522 - DNA, 201 bp, Homo sapiens; identical to SEQ ID NO: 52504

SEQ ID NO: 53523 - DNA, 201 bp, Homo sapiens; identical to SEQ ID NO: 52506

SEQ ID NO: 53524 - DNA, 201 bp, Homo sapiens
tgaacatggtggtgcgcacctgtagtcccagctacttgggaggctgaggcaggagagtcgcttgaacccaggatgtggaggttgaagtgagccaagatcgygccactgcactccagtctagcgacagatggagactctgtctcaaaaaaaaaaaaataagtatttttctttctagccgtatatccaccttacatggtccct

SEQ ID NO: 53525 - DNA, 201 bp, Homo sapiens; identical to SEQ ID NO: 52508

SEQ ID NO: 53526 - DNA, 201 bp, Homo sapiens; identical to SEQ ID NO: 9705

SEQ ID NO: 53527 - DNA, 201 bp, Homo sapiens; identical to SEQ ID NO: 52514

SEQ ID NO: 53528 - DNA, 201 bp, Homo sapiens
ggaggccaaggtgggaggatcacaaggttaggagttcaagaccagcctggccaacttggtgaaaccccatctctactaaaaatacaaaaattagccgggtrtagtggtgatcgcctgtaatcccagctattcgttaggctgaggcaggagaatcgcttgaacccgggaggcagaggttgcagtgagctgagattgtgccac

SEQ ID NO: 53529 - DNA, 201 bp, Homo sapiens; identical to SEQ ID NO: 52520

SEQ ID NO: 53530 - DNA, 201 bp, Homo sapiens
ttgcttgagcccaagaagttgaggctgcagtgagctatgatggtgccactgcactccaacctggatgacagaacaagaaactgtctcaaaaaaaaaaaaawaaaaaaaaaaaaaaggtcaggcacggtggctcaggcctgtaatcccagcactttgggaggccaaggtgggaggattacttgagcccaggcagtcaagacc

SEQ ID NO: 53531 - DNA, 201 bp, Homo sapiens; identical to SEQ ID NO: 52652

SEQ ID NO: 53532 - DNA, 201 bp, Homo sapiens
ctgagatcccaagattcactagcccttgaataaaaaaaaggaaaaagaaaaaaacagtatattttttcgttttgcaaatcacagttcccttattaagatgraattgctgccaattacagagaagctatttgcctaagccaaaaatccatgaggttcacatggacttatagttacacaaattagaaacaaatgttatattta

SEQ ID NO: 53533 - DNA, 201 bp, Homo sapiens
gattcactagcccttgaataaaaaaaaggaaaaagaaaaaaacagtatattttttcgttttgcaaatcacagttcccttattaagatggaattgctgccawttacagagaagctatttgcctaagccaaaaatccatgaggttcacatggacttatagttacacaaattagaaacaaatgttatatttaaaaccatagaga

SEQ ID NO: 53534 - DNA, 201 bp, Homo sapiens
agctgcagtagccatgtttgtgccactgcactccagcctggataacagaacgagaccctgtctccctgtctcaaaatattaatgtgtgtgtgcgtgcgtgygtgtgtgtgtgtgtgtgtgtgtgttttggtctccatcctggctcctggccagacctcctaaagcccttgtaatttcctaaatgataaagtgaagggagct

SEQ ID NO: 53535 - DNA, 201 bp, Homo sapiens
cgttttgcaaatcacagttcccttattaagatggaattgctgccaattacagagaagctatttgcctaagccaaaaatccatgaggttcacatggacttayagttacacaaattagaaacaaatgttatatttaaaaccatagagaaatgcccaggtgatgaaagctggggtgaaggagtctgcacattcatttcaaactg

SEQ ID NO: 53536 - DNA, 201 bp, Homo sapiens
ttgtgccactgcactccagcctgggcaacagagcgagattctgtctcaacaaaaaaagctgggtgcagtggctcacgcctgtaatcctagcactttgggartccgaggtgggtagatcacctaaggtcaggagttcaagaccagcctggtcaacatggtgaaaccccgcctctacaaaaatacaaaaattagctaggtatg

SEQ ID NO: 53537 - DNA, 201 bp, Homo sapiens
gaggctgaggtaggagaattgcttgaacccaggaggcagtggttgcagtgagccgagattgcaccattgcactcccgcctgggcgacagagcaagactccractcaaaaaaaaaaaaaaaagcagcagcagcagccagaggccactccagcatctcccctacctggcttgggtcagggagagggcagtgagaagtgaaaac

SEQ ID NO: 53538 - DNA, 201 bp, Homo sapiens; identical to SEQ ID NO: 52522

SEQ ID NO: 53539 - DNA, 201 bp, Homo sapiens; identical to SEQ ID NO: 52524

SEQ ID NO: 53540 - DNA, 201 bp, Homo sapiens; identical to SEQ ID NO: 52523

SEQ ID NO: 53541 - DNA, 201 bp, Homo sapiens; identical to SEQ ID NO: 52525

SEQ ID NO: 53542 - DNA, 201 bp, Homo sapiens
agcagccagaggccactccagcatctcccctacctggcttgggtcagggagagggcagtgagaagtgaaaactcccagctacagaaaaggaaatatgttgsggggaagggagaaggaaaggtgtcttcatcaatgccggggcagggtagatggagccctgggcagggagtttggaccaggaaatctcaatgagggaaatgt

SEQ ID NO: 53543 - DNA, 201 bp, Homo sapiens
agttcaagaccagcctggccaacttggtgaaaccccatctctactaaaaatacaaaaattagccgggtatagtggtgatcgcctgtaatcccagctattcrttaggctgaggcaggagaatcgcttgaacccgggaggcagaggttgcagtgagctgagattgtgccactgcactccagcctgggcaacagagcgagattc

SEQ ID NO: 53544 - DNA, 201 bp, Homo sapiens
ggcgacagagcaagactccgactcaaaaaaaaaaaaaaaagcagcagcagcagccagaggccactccagcatctcccctacctggcttgggtcagggagasggcagtgagaagtgaaaactcccagctacagaaaaggaaatatgttggggggaagggagaaggaaaggtgtcttcatcaatgccggggcagggtagatgg

SEQ ID NO: 53545 - DNA, 201 bp, Homo sapiens
gaaggattgcttgagcccaagaagttgaggctgcagtgagctatgatggtgccactgcactccaacctggatgacagaacaagaaactgtctcaaaaaaawaaaaataaaaaaaaaaaaaaggtcaggcacggtggctcaggcctgtaatcccagcactttgggaggccaaggtgggaggattacttgagcccaggcagtc

SEQ ID NO: 53546 - DNA, 201 bp, Homo sapiens
tcagagaacgcttctctaaccactctatttattttattattttattgtattttttgagacagggtctcactctgttgcccagactggagtgtaatggcacrgtcatggctcactgcagccttgatctcctgggctcaagcgatcctctcacttcagcctcccaagtggctaggaccacaggcgtaagccaccgtgtctggc

SEQ ID NO: 53547 - DNA, 201 bp, Homo sapiens; identical to SEQ ID NO: 52545

SEQ ID NO: 53548 - DNA, 201 bp, Homo sapiens; identical to SEQ ID NO: 52548

SEQ ID NO: 53549 - DNA, 201 bp, Homo sapiens
tgcctagggaggcatgtgtcagaggctatcatccactctgttgaacccacagtgaccagcaccaccatcacacaaacatgcctgcatgtgtgcacgcacgygcagtgtgcaaacctgatgtcagcctcactccctggctcttctgtccacaaacgctgtttctttaagtaccactttcagttcctccaaagaatctactta

SEQ ID NO: 53550 - DNA, 201 bp, Homo sapiens; identical to SEQ ID NO: 52550

SEQ ID NO: 53551 - DNA, 201 bp, Homo sapiens; identical to SEQ ID NO: 52549

SEQ ID NO: 53552 - DNA, 201 bp, Homo sapiens
tgaagcctccataaaaaaaaacaaaaaagatgagggttggagagctgccaggttgatgaacacatggaggtgcagggaggtgcccagagaggacaagaaarctccaaatcccccttccccgatactttgtccggagcaactcttccatctgactgttcctaagttttatccttcataataaactagctaacataagtaaag

SEQ ID NO: 53553 - DNA, 201 bp, Homo sapiens; identical to SEQ ID NO: 9707

SEQ ID NO: 53554 - DNA, 201 bp, Homo sapiens; identical to SEQ ID NO: 52551

SEQ ID NO: 53555 - DNA, 201 bp, Homo sapiens; identical to SEQ ID NO: 52554

SEQ ID NO: 53556 - DNA, 201 bp, Homo sapiens; identical to SEQ ID NO: 52553

SEQ ID NO: 53557 - DNA, 201 bp, Homo sapiens; identical to SEQ ID NO: 52556

SEQ ID NO: 53558 - DNA, 201 bp, Homo sapiens
tgaggtaggagaattgcttgaacccaggaggcagtggttgcagtgagccgagattgcaccattgcactcccgcctgggcgacagagcaagactccgactcaaaaaaaaaaaaaaaagcagcagcagcagccagaggccactccagcatctcccctacctggcttgggtcagggagagggcagtgagaagtgaaaactccca

SEQ ID NO: 53559 - DNA, 201 bp, Homo sapiens; identical to SEQ ID NO: 52558

SEQ ID NO: 53560 - DNA, 201 bp, Homo sapiens; identical to SEQ ID NO: 52561

SEQ ID NO: 53561 - DNA, 201 bp, Homo sapiens; identical to SEQ ID NO: 52562

SEQ ID NO: 53562 - DNA, 201 bp, Homo sapiens
ggaaggattgcttgagcccaagaagttgaggctgcagtgagctatgatggtgccactgcactccaacctggatgacagaacaagaaactgtctcaaaaaawaaaaaataaaaaaaaaaaaaaggtcaggcacggtggctcaggcctgtaatcccagcactttgggaggccaaggtgggaggattacttgagcccaggcagt

SEQ ID NO: 53563 - DNA, 201 bp, Homo sapiens; identical to SEQ ID NO: 52564

SEQ ID NO: 53564 - DNA, 201 bp, Homo sapiens; identical to SEQ ID NO: 9706

SEQ ID NO: 53565 - DNA, 201 bp, Homo sapiens; identical to SEQ ID NO: 52565

SEQ ID NO: 53566 - DNA, 201 bp, Homo sapiens; identical to SEQ ID NO: 52567

SEQ ID NO: 53567 - DNA, 201 bp, Homo sapiens; identical to SEQ ID NO: 52568

SEQ ID NO: 53568 - DNA, 201 bp, Homo sapiens; identical to SEQ ID NO: 52569

SEQ ID NO: 53569 - DNA, 201 bp, Homo sapiens
gcttgaacccaggaggcagtggttgcagtgagccgagattgcaccattgcactcccgcctgggcgacagagcaagactccgactcaaaaaaaaaaaaaaargcagcagcagcagccagaggccactccagcatctcccctacctggcttgggtcagggagagggcagtgagaagtgaaaactcccagctacagaaaaggaa

SEQ ID NO: 53570 - DNA, 201 bp, Homo sapiens; identical to SEQ ID NO: 52699

SEQ ID NO: 53571 - DNA, 201 bp, Homo sapiens; identical to SEQ ID NO: 52700

SEQ ID NO: 53572 - DNA, 201 bp, Homo sapiens; identical to SEQ ID NO: 52701

SEQ ID NO: 53573 - DNA, 201 bp, Homo sapiens; identical to SEQ ID NO: 9704

SEQ ID NO: 53574 - DNA, 201 bp, Homo sapiens; identical to SEQ ID NO: 52703

SEQ ID NO: 53575 - DNA, 201 bp, Homo sapiens; identical to SEQ ID NO: 52586

SEQ ID NO: 53576 - DNA, 201 bp, Homo sapiens; identical to SEQ ID NO: 52588

SEQ ID NO: 53577 - DNA, 201 bp, Homo sapiens; identical to SEQ ID NO: 52592

SEQ ID NO: 53578 - DNA, 201 bp, Homo sapiens; identical to SEQ ID NO: 52705

SEQ ID NO: 53579 - DNA, 201 bp, Homo sapiens; identical to SEQ ID NO: 52707

SEQ ID NO: 53580 - DNA, 201 bp, Homo sapiens; identical to SEQ ID NO: 52595

SEQ ID NO: 53581 - DNA, 201 bp, Homo sapiens; identical to SEQ ID NO: 9703

SEQ ID NO: 53582 - DNA, 201 bp, Homo sapiens; identical to SEQ ID NO: 52600

SEQ ID NO: 53583 - DNA, 201 bp, Homo sapiens; identical to SEQ ID NO: 28498

SEQ ID NO: 53584 - DNA, 201 bp, Homo sapiens; identical to SEQ ID NO: 28499

SEQ ID NO: 53585 - DNA, 201 bp, Homo sapiens; identical to SEQ ID NO: 28505

SEQ ID NO: 53586 - DNA, 201 bp, Homo sapiens; identical to SEQ ID NO: 52488

SEQ ID NO: 53587 - DNA, 201 bp, Homo sapiens; identical to SEQ ID NO: 52489

SEQ ID NO: 53588 - DNA, 201 bp, Homo sapiens; identical to SEQ ID NO: 28513

SEQ ID NO: 53589 - DNA, 201 bp, Homo sapiens; identical to SEQ ID NO: 52618

SEQ ID NO: 53590 - DNA, 201 bp, Homo sapiens; identical to SEQ ID NO: 52494

SEQ ID NO: 53591 - DNA, 201 bp, Homo sapiens; identical to SEQ ID NO: 52620

SEQ ID NO: 53592 - DNA, 201 bp, Homo sapiens; identical to SEQ ID NO: 52624

SEQ ID NO: 53593 - DNA, 201 bp, Homo sapiens; identical to SEQ ID NO: 52623

SEQ ID NO: 53594 - DNA, 201 bp, Homo sapiens; identical to SEQ ID NO: 52625

SEQ ID NO: 53595 - DNA, 201 bp, Homo sapiens; identical to SEQ ID NO: 28520

SEQ ID NO: 53596 - DNA, 201 bp, Homo sapiens; identical to SEQ ID NO: 28519

SEQ ID NO: 53597 - DNA, 201 bp, Homo sapiens; identical to SEQ ID NO: 28521

SEQ ID NO: 53598 - DNA, 201 bp, Homo sapiens; identical to SEQ ID NO: 28522

SEQ ID NO: 53599 - DNA, 201 bp, Homo sapiens; identical to SEQ ID NO: 28524

SEQ ID NO: 53600 - DNA, 201 bp, Homo sapiens; identical to SEQ ID NO: 28525

SEQ ID NO: 53601 - DNA, 201 bp, Homo sapiens; identical to SEQ ID NO: 28531

SEQ ID NO: 53602 - DNA, 201 bp, Homo sapiens; identical to SEQ ID NO: 52649

SEQ ID NO: 53603 - DNA, 201 bp, Homo sapiens; identical to SEQ ID NO: 28539

SEQ ID NO: 53604 - DNA, 201 bp, Homo sapiens; identical to SEQ ID NO: 28545

SEQ ID NO: 53605 - DNA, 201 bp, Homo sapiens; identical to SEQ ID NO: 28546

SEQ ID NO: 53606 - DNA, 201 bp, Homo sapiens; identical to SEQ ID NO: 28548

SEQ ID NO: 53607 - DNA, 201 bp, Homo sapiens; identical to SEQ ID NO: 28550

SEQ ID NO: 53608 - DNA, 201 bp, Homo sapiens; identical to SEQ ID NO: 52656

SEQ ID NO: 53609 - DNA, 201 bp, Homo sapiens; identical to SEQ ID NO: 28552

SEQ ID NO: 53610 - DNA, 201 bp, Homo sapiens; identical to SEQ ID NO: 28555

SEQ ID NO: 53611 - DNA, 201 bp, Homo sapiens; identical to SEQ ID NO: 52659

SEQ ID NO: 53612 - DNA, 201 bp, Homo sapiens; identical to SEQ ID NO: 28557

SEQ ID NO: 53613 - DNA, 201 bp, Homo sapiens; identical to SEQ ID NO: 52660

SEQ ID NO: 53614 - DNA, 201 bp, Homo sapiens; identical to SEQ ID NO: 28560

SEQ ID NO: 53615 - DNA, 201 bp, Homo sapiens; identical to SEQ ID NO: 52665

SEQ ID NO: 53616 - DNA, 201 bp, Homo sapiens; identical to SEQ ID NO: 52666

SEQ ID NO: 53617 - DNA, 201 bp, Homo sapiens; identical to SEQ ID NO: 28500

SEQ ID NO: 53618 - DNA, 201 bp, Homo sapiens; identical to SEQ ID NO: 28502

SEQ ID NO: 53619 - DNA, 201 bp, Homo sapiens; identical to SEQ ID NO: 28503

SEQ ID NO: 53620 - DNA, 201 bp, Homo sapiens; identical to SEQ ID NO: 28504

SEQ ID NO: 53621 - DNA, 201 bp, Homo sapiens; identical to SEQ ID NO: 28506

SEQ ID NO: 53622 - DNA, 201 bp, Homo sapiens; identical to SEQ ID NO: 28508

SEQ ID NO: 53623 - DNA, 201 bp, Homo sapiens; identical to SEQ ID NO: 28512

SEQ ID NO: 53624 - DNA, 201 bp, Homo sapiens; identical to SEQ ID NO: 52544

SEQ ID NO: 53625 - DNA, 201 bp, Homo sapiens; identical to SEQ ID NO: 28515

SEQ ID NO: 53626 - DNA, 201 bp, Homo sapiens; identical to SEQ ID NO: 28517

SEQ ID NO: 53627 - DNA, 201 bp, Homo sapiens; identical to SEQ ID NO: 28518

SEQ ID NO: 53628 - DNA, 201 bp, Homo sapiens; identical to SEQ ID NO: 28523

SEQ ID NO: 53629 - DNA, 201 bp, Homo sapiens; identical to SEQ ID NO: 28526

SEQ ID NO: 53630 - DNA, 201 bp, Homo sapiens; identical to SEQ ID NO: 52687

SEQ ID NO: 53631 - DNA, 201 bp, Homo sapiens; identical to SEQ ID NO: 52688

SEQ ID NO: 53632 - DNA, 201 bp, Homo sapiens; identical to SEQ ID NO: 52689

SEQ ID NO: 53633 - DNA, 201 bp, Homo sapiens; identical to SEQ ID NO: 52690

SEQ ID NO: 53634 - DNA, 201 bp, Homo sapiens; identical to SEQ ID NO: 28527

SEQ ID NO: 53635 - DNA, 201 bp, Homo sapiens; identical to SEQ ID NO: 28528

SEQ ID NO: 53636 - DNA, 201 bp, Homo sapiens; identical to SEQ ID NO: 28529

SEQ ID NO: 53637 - DNA, 201 bp, Homo sapiens; identical to SEQ ID NO: 28530

SEQ ID NO: 53638 - DNA, 201 bp, Homo sapiens; identical to SEQ ID NO: 28532

SEQ ID NO: 53639 - DNA, 201 bp, Homo sapiens; identical to SEQ ID NO: 28533

SEQ ID NO: 53640 - DNA, 201 bp, Homo sapiens; identical to SEQ ID NO: 28534

SEQ ID NO: 53641 - DNA, 201 bp, Homo sapiens; identical to SEQ ID NO: 28535

SEQ ID NO: 53642 - DNA, 201 bp, Homo sapiens; identical to SEQ ID NO: 28536

SEQ ID NO: 53643 - DNA, 201 bp, Homo sapiens; identical to SEQ ID NO: 28537

SEQ ID NO: 53644 - DNA, 201 bp, Homo sapiens; identical to SEQ ID NO: 28538

SEQ ID NO: 53645 - DNA, 201 bp, Homo sapiens; identical to SEQ ID NO: 28540

SEQ ID NO: 53646 - DNA, 201 bp, Homo sapiens; identical to SEQ ID NO: 28541

SEQ ID NO: 53647 - DNA, 201 bp, Homo sapiens; identical to SEQ ID NO: 28543

SEQ ID NO: 53648 - DNA, 201 bp, Homo sapiens; identical to SEQ ID NO: 52581

SEQ ID NO: 53649 - DNA, 201 bp, Homo sapiens; identical to SEQ ID NO: 28544

SEQ ID NO: 53650 - DNA, 201 bp, Homo sapiens; identical to SEQ ID NO: 52583

SEQ ID NO: 53651 - DNA, 201 bp, Homo sapiens; identical to SEQ ID NO: 52704

SEQ ID NO: 53652 - DNA, 201 bp, Homo sapiens; identical to SEQ ID NO: 52591

SEQ ID NO: 53653 - DNA, 201 bp, Homo sapiens; identical to SEQ ID NO: 52594

SEQ ID NO: 53654 - DNA, 201 bp, Homo sapiens; identical to SEQ ID NO: 52706

SEQ ID NO: 53655 - DNA, 201 bp, Homo sapiens; identical to SEQ ID NO: 28554

SEQ ID NO: 53656 - DNA, 201 bp, Homo sapiens; identical to SEQ ID NO: 28559

SEQ ID NO: 53657 - DNA, 201 bp, Homo sapiens; identical to SEQ ID NO: 28501

SEQ ID NO: 53658 - DNA, 201 bp, Homo sapiens
tagtcccagctactcgggaggctgaggtgggagatctcttaaactcaggaggcataggttgcagtgagccaagattgcgccaccatgctccagcctgggtwacagagctagaccctgtctcaaaaaaaaccagaagaatcttggaaggaggggtctaaggttctagggggccagcagagctcacttttctagcctcttgaa

SEQ ID NO: 53659 - DNA, 201 bp, Homo sapiens
ccctctcccaggtgctcttcccagctctggggtagccgctgtcctgactggtagtagcttagatgagttctgtctgtgcttgatggaaatggcatcgtacrcatctgcttttacctatatagtgttttgcacacgtgttaacaaatctgtgtggcctgtactctgacggaaaataccaaaccaatgataattaagtcatga

SEQ ID NO: 53660 - DNA, 201 bp, Homo sapiens
ctgtagtcccagctactcgggaggctgaggtgggagatctcttaaactcaggaggcataggttgcagtgagccaagattgcgccaccatgctccagcctgrgtaacagagctagaccctgtctcaaaaaaaaccagaagaatcttggaaggaggggtctaaggttctagggggccagcagagctcacttttctagcctctt

SEQ ID NO: 53661 - DNA, 201 bp, Homo sapiens
tctctgatttctttaaccccaaattcatgctttattttgatcctccacctgactcttgtctagttttgtgacgtatatcacttgttctcatgttttctaartccgcaattcagacctattccaaaatgcgtttcctcatgggtctggtttgttgtctgtttctcctgctttgcaccttccagtctagagtttcatcttctg

SEQ ID NO: 53662 - DNA, 201 bp, Homo sapiens
cccaaattcatgctttattttgatcctccacctgactcttgtctagttttgtgacgtatatcacttgttctcatgttttctaaatccgcaattcagacctattccaaaatgcgtttcctcatgggtctggtttgttgtctgtttctcctgctttgcaccttccagtctagagtttcatcttctgcattgacattgttgcag

SEQ ID NO: 53663 - DNA, 201 bp, Homo sapiens
cctcccccacctgtcctgcagtctttgacttttcctttcttttttgccaccctttcaggaaccctgtatggtttttagtttaaattaaaggagtcgttatygtggtgggaatatgaaataaagtagaagaaaaggccatgagctagtctgctggtgcttgctgttggggaagggaaggtgatggtgtgttggactccaggg

SEQ ID NO: 53664 - DNA, 201 bp, Homo sapiens
agtgactgtgggaaagttatttgattatctgtgcttgagttaccttattgtagaatgttcttgagctgagaagttgggaaccacgaggctttagctctgarcaggtccatagaggagctcaggtggggaggtgggaatgcaggtgactggcagggcctggatggggctcatgctgctgcctctctgacctctgccctggcc

SEQ ID NO: 53665 - DNA, 201 bp, Homo sapiens
ccaaattcatgctttattttgatcctccacctgactcttgtctagttttgtgacgtatatcacttgttctcatgttttctaaatccgcaattcagacctattccaaaatgcgtttcctcatgggtctggtttgttgtctgtttctcctgctttgcaccttccagtctagagtttcatcttctgcattgacattgttgcagt

SEQ ID NO: 53666 - DNA, 201 bp, Homo sapiens; identical to SEQ ID NO: 28507

SEQ ID NO: 53667 - DNA, 201 bp, Homo sapiens
caaattcatgctttattttgatcctccacctgactcttgtctagttttgtgacgtatatcacttgttctcatgttttctaaatccgcaattcagacctattccaaaatgcgtttcctcatgggtctggtttgttgtctgtttctcctgctttgcaccttccagtctagagtttcatcttctgcattgacattgttgcagtt

SEQ ID NO: 53668 - DNA, 201 bp, Homo sapiens
aattcatgctttattttgatcctccacctgactcttgtctagttttgtgacgtatatcacttgttctcatgttttctaaatccgcaattcagacctattccaaaatgcgtttcctcatgggtctggtttgttgtctgtttctcctgctttgcaccttccagtctagagtttcatcttctgcattgacattgttgcagttat

SEQ ID NO: 53669 - DNA, 201 bp, Homo sapiens
gaagatgagcagctcagaggaggtgtcctggatttcctggttctgtgggctccgtggcaatgaattcttctgtgaagtgagttctcttcaacctccctacktgccagcttcacatatcttcccaccagacgttccttcacatattccacttctacactgttctcttacatgctatttgaaaacttcctatcagcaaagagt

SEQ ID NO: 53670 - DNA, 201 bp, Homo sapiens
attcatgctttattttgatcctccacctgactcttgtctagttttgtgacgtatatcacttgttctcatgttttctaaatccgcaattcagacctattccaaaatgcgtttcctcatgggtctggtttgttgtctgtttctcctgctttgcaccttccagtctagagtttcatcttctgcattgacattgttgcagttatg

SEQ ID NO: 53671 - DNA, 201 bp, Homo sapiens
gtttgggttgctttaagaaagggtggttccgaattctcccgtggttggagggccgaatgtgggaggagggaggataccagaggcagggaaggagaacttgmgctttactgacactgttctttttctagctgacgtgaagatgagcagctcagaggaggtgtcctggatttcctggttctgtgggctccgtggcaatgaatt

SEQ ID NO: 53672 - DNA, 201 bp, Homo sapiens; identical to SEQ ID NO: 28509

SEQ ID NO: 53673 - DNA, 201 bp, Homo sapiens; identical to SEQ ID NO: 28510

SEQ ID NO: 53674 - DNA, 201 bp, Homo sapiens; identical to SEQ ID NO: 28514

SEQ ID NO: 53675 - DNA, 201 bp, Homo sapiens
gtgtggtggcatgtgcttgtaatcccagctactcgggaggctgaggcagaagaatcacttgaacctgggaggcagaagttgcaatgagccaagatcacacsactgcactccagcctaggtgacagtgagactgtctcaaaaaaagagtggccttctcacccacctccttctacctgggcctggtcctttcgcagccccctt

SEQ ID NO: 53676 - DNA, 201 bp, Homo sapiens
gaggccggagaatcacttgaacctggaaggtggaggtggcgatgagccgagattgcaccattgcactccagcctgggcaacaagagtgaaactgtgtctcaaaaaaaaaaaaaaaaaaaaagggttagtgaggtttgggatccaaataggattgcagagccctctccattgcacttggcgtttgtcgcttcctctcggcct

SEQ ID NO: 53677 - DNA, 201 bp, Homo sapiens
gtggcaatgaattcttctgtgaagtgagttctcttcaacctccctacttgccagcttcacatatcttcccaccagacgttccttcacatattccacttctrcactgttctcttacatgctatttgaaaacttcctatcagcaaagagtcccccctataaaccccgacgaacctgtgctaaagtggcaaaactggggcccaa

SEQ ID NO: 53678 - DNA, 201 bp, Homo sapiens
gaattgcttgaactggggaggtggaggttgcagtgagccaagattgcgccactgcactccagcctgggtgacagagcagcaaaaaaaaaaaagacaggatyggagcaatgtcttatgggattatgggaacaagacttggggtgcagcttaggaggctgagagagtttccgtttgggagagtgctgggcccatgacaggaga

SEQ ID NO: 53679 - DNA, 201 bp, Homo sapiens
aaattctggctcagcatctgtgagactcaggcaaggttatgacctttctgcacctgtttcctcatctgtaaaatgcacatagtaataatacctgcctcagyggattgcaagtgtttagaacagtgcctagcacatattatgtgttacgtttttgctaacttaagaaaggtggggggtcggtggaagagcaggcatcgggaa

SEQ ID NO: 53680 - DNA, 201 bp, Homo sapiens
ccatctctactaaaaatacaaaaaattagctgggcgtggtggcgtgcacctttaatcccagctgcttgggagactgaggcacaagaattgcttgaactggrgaggtggaggttgcagtgagccaagattgcgccactgcactccagcctgggtgacagagcagcaaaaaaaaaaaagacaggattggagcaatgtcttatg

SEQ ID NO: 53681 - DNA, 201 bp, Homo sapiens
actgcagacagatgcggaagcagacagcttgaggacaggcaagggcacctggagatctggagggtccccgtcaaagctgcgcaccttgatagggtagaagmtattcagctacagattgaggagagaaggttagtggaagtggagacagagtgtggctctgaagaaaagggaagagaggctgggcacggtggctcacgcctg

SEQ ID NO: 53682 - DNA, 201 bp, Homo sapiens
tctccaaaaaaaaggatgaggaatagaattctgtgcagatgtcctgacttggcaattttgtgtccctgcctcactgtctccaccaacccccgcctgtcctrgtgttgttctgcctcctgtcctctcttgctctcttgtcagtctctggcttcctcggccccatttcacttcactgagtcctgacacccatctccctagggg

SEQ ID NO: 53683 - DNA, 201 bp, Homo sapiens
ctgggggtacagagtagcagtaagtgtgctgaagggcgtcaaccaagaggaagagccaaggctggggtccagtggctggagggaggcaaggagggctggtrtgagggactagaagtcctggccaagcccagatagaagtcaggaaggtggctggaaactggtggaattttacaccaaagtttgctgcagtcacactaagga

SEQ ID NO: 53684 - DNA, 201 bp, Homo sapiens
tttggtaaaacattcagaagcttgcacatatcacaagatggatttttgtaaaccacacatctgtgtaaccagccaccaaatcagcgtgaagacctttaccygcagccaagcctgcctctgttcccctctcccaggtgctcttcccagctctggggtagccgctgtcctgactggtagtagcttagatgagttctgtctgtg

SEQ ID NO: 53685 - DNA, 201 bp, Homo sapiens
ggttaatgcctggcgcagtggctcacgcctgtaatcccagcactttgggaggctgaggcaggcggatcacctgagattgggagtttgagaccagcctgacyaatatggagaaaccccatcgctactaaaaatacaaaattagccgggcttggtagcgcatacctgtaattacagctactcgggaggctgaggccggagaat

SEQ ID NO: 53686 - DNA, 201 bp, Homo sapiens
aatcccagcactttgggaggccgaggtgggcggatcacttgagattgggagtttgagaccagcctggccaacatggtaaaacccgctctctattaaaaatwgaaaaatcagctgggtgtggtggcacacctctgtaatcccagctactcaggaggctgagacaggagaatcacttgaacccgggaggcagaggttgcagtg

SEQ ID NO: 53687 - DNA, 201 bp, Homo sapiens
gatgtttgctgctgccctgcttgagagaaatgaccaaaatgcccatcaatagtgggatggggaaatcagctgtgatatgcgcatgctatggagtagtatasagcaggtcaataaaacaaggaagctgtttacaaactgatatcggaacattcagttcccctaacttaaatgtggaataatgtttacagtgggatgctacta

SEQ ID NO: 53688 - DNA, 201 bp, Homo sapiens; identical to SEQ ID NO: 9744

SEQ ID NO: 53689 - DNA, 201 bp, Homo sapiens; identical to SEQ ID NO: 9745

SEQ ID NO: 53690 - DNA, 201 bp, Homo sapiens; identical to SEQ ID NO: 9746

SEQ ID NO: 53691 - DNA, 201 bp, Homo sapiens
ttcatgctttattttgatcctccacctgactcttgtctagttttgtgacgtatatcacttgttctcatgttttctaaatccgcaattcagacctattccaaaatgcgtttcctcatgggtctggtttgttgtctgtttctcctgctttgcaccttccagtctagagtttcatcttctgcattgacattgttgcagttatgt

SEQ ID NO: 53692 - DNA, 201 bp, Homo sapiens
tcatgctttattttgatcctccacctgactcttgtctagttttgtgacgtatatcacttgttctcatgttttctaaatccgcaattcagacctattccaaaatgcgtttcctcatgggtctggtttgttgtctgtttctcctgctttgcaccttccagtctagagtttcatcttctgcattgacattgttgcagttatgta

SEQ ID NO: 53693 - DNA, 201 bp, Homo sapiens
catgttttctaaatccgcaattcagacctattccaaaatgcgtttcctcatgggtctggtttgttgtctgtttctcctgctttgcaccttccagtctagartttcatcttctgcattgacattgttgcagttatgtattgaggagggagttgggagggagagcaaggagcagaggctgaaaaggtgtgaagggaaggcaga

SEQ ID NO: 53694 - DNA, 201 bp, Homo sapiens; identical to SEQ ID NO: 9829

SEQ ID NO: 53695 - DNA, 201 bp, Homo sapiens
cttgggagactgaggcacaagaattgcttgaactggggaggtggaggttgcagtgagccaagattgcgccactgcactccagcctgggtgacagagcagcaaaaaaaaaaaagacaggattggagcaatgtcttatgggattatgggaacaagacttggggtgcagcttaggaggctgagagagtttccgtttgggagagt

SEQ ID NO: 53696 - DNA, 201 bp, Homo sapiens; identical to SEQ ID NO: 9737

SEQ ID NO: 53697 - DNA, 201 bp, Homo sapiens; identical to SEQ ID NO: 9738

SEQ ID NO: 53698 - DNA, 201 bp, Homo sapiens; identical to SEQ ID NO: 9739

SEQ ID NO: 53699 - DNA, 201 bp, Homo sapiens; identical to SEQ ID NO: 28549

SEQ ID NO: 53700 - DNA, 201 bp, Homo sapiens; identical to SEQ ID NO: 9740

SEQ ID NO: 53701 - DNA, 201 bp, Homo sapiens
cccattttcctccacaataaactgggactgggctaaaactgtgtcacattgtttgtggggtcaggctcaggtgtgggcaggtaaacacagattaaagaggkttaatgcctggcgcagtggctcacgcctgtaatcccagcactttgggaggctgaggcaggcggatcacctgagattgggagtttgagaccagcctgacca

SEQ ID NO: 53702 - DNA, 201 bp, Homo sapiens; identical to SEQ ID NO: 9743

SEQ ID NO: 53703 - DNA, 201 bp, Homo sapiens; identical to SEQ ID NO: 9742

SEQ ID NO: 53704 - DNA, 201 bp, Homo sapiens
cttttttttctaaggttcttactatgttgcccaagctggccttgaactcctgggctcaagagattcttctgcctcagcctccaagtagctgggactacagwtgcacaccaccatgctcacctggctgatttacttattttcaaacctttttggtaaaacattcagaagcttgcacatatcacaagatggatttttgtaaac

SEQ ID NO: 53705 - DNA, 201 bp, Homo sapiens; identical to SEQ ID NO: 28551

SEQ ID NO: 53706 - DNA, 201 bp, Homo sapiens; identical to SEQ ID NO: 28553

SEQ ID NO: 53707 - DNA, 201 bp, Homo sapiens; identical to SEQ ID NO: 9822

SEQ ID NO: 53708 - DNA, 201 bp, Homo sapiens; identical to SEQ ID NO: 28556

SEQ ID NO: 53709 - DNA, 201 bp, Homo sapiens
tgtttggatatctatgactgtctgtttatactgtaaggggcttaatcagcagctccatcttttagttttagttctaaaggaaaagtagcctaaagtcagtmtaactaaagggtggaacgaggtgggacaaggtccggaattgctgctcagtgatgtgtgtgtgcctgccgctggtggagctgagactgctcatctcagaag

SEQ ID NO: 53710 - DNA, 201 bp, Homo sapiens; identical to SEQ ID NO: 9824

SEQ ID NO: 53711 - DNA, 201 bp, Homo sapiens; identical to SEQ ID NO: 9748

SEQ ID NO: 53712 - DNA, 201 bp, Homo sapiens
agcccccttcccaccaacatagccctctaaacgcccctagcccccacacagctctggtctgacagcactgccgaggatgcccactaactttctggcattcrccataggagggctttcatttcctctttctctttttgtgtctagagcaaatcacataccaaggcaggacaagaggacagctcagcagagctgggggtccct

SEQ ID NO: 53713 - DNA, 201 bp, Homo sapiens
atatgggttccctcttggcttccatgtcctgacaggtggatgaagactacatccaggacaaatttaatcttactggactcaatgagcaggtccctcactaycgacaagctctagacatgatcttggacctggagcctggtgaggcaccctcagggttgttttgtgtgtgtgcgtgcactatttttctcttcaaatctctat

SEQ ID NO: 53714 - DNA, 201 bp, Homo sapiens
catccctgtgcatggtgatcaccatctattatggtaaataaggtcccaggaaggggctgctggtggggcagccaatggcttggtcttctctcctctcacaratcagggctgctccgggcatggggtacaagaagagaggaggggctgagtgcaatggctcatgcctgtaaccctagcactttgggaggctgaggcaggtgg

SEQ ID NO: 53715 - DNA, 201 bp, Homo sapiens
tttcacaaacataagtccatatactatgtgccaagaatacaggtaaagacattcccaaccctcaaagagttcacagctggagagggaaagtgccatgttaycaatttttttcttttttttttgagatgcagtttcgctctcattgcccaggctggagtgcaatggcatgatctcggctcaccacaacctctgccccccgag

SEQ ID NO: 53716 - DNA, 201 bp, Homo sapiens
actgcaacctccgcttcctgggctcaagcatattttttgtagaaagcaggctttgccgggacatggtggcatgtgcctgtaatcccggctacttgggaggytgaggcaggagaatcgctaaggtggaagttgcagtgagccaggatcatggcactgcactccaacctgggcagcagagcaagactccatctcaaaaaaaaa

SEQ ID NO: 53717 - DNA, 201 bp, Homo sapiens
tttattgttggtgaggatgggggtgggggccggacgcaggacctctggacaacagtctcatggagttttattaatctttactaaggagcaaagtcggtattgtagggttccatgtttttacgcaaagtctctctcccttaggccctgcagagtcctaagttgtggggttactttagtggcaggaaagtgtttttgactact

SEQ ID NO: 53718 - DNA, 201 bp, Homo sapiens
ttcaagaggctagaaaagtgagctctgctggccccctagaaccttagacccctccttccaagattcttctggttttttttgagacagggtctagctctgtwacccaggctggagcatggtggcgcaatcttggctcactgcaacctatgcctcctgagtttaagagatctcccacctcagcctcccgagtagctgggacta

SEQ ID NO: 53719 - DNA, 201 bp, Homo sapiens
cagaagatgaaactctagactggaaggtgcaaagcaggagaaacagacaacaaaccagacccatgaggaaacgcattttggaataggtctgaattgcggayttagaaaacatgagaacaagtgatatacgtcacaaaactagacaagagtcaggtggaggatcaaaataaagcatgaatttggggttaaagaaatcagaga

SEQ ID NO: 53720 - DNA, 201 bp, Homo sapiens
ctgcaacaatgtcaatgcagaagatgaaactctagactggaaggtgcaaagcaggagaaacagacaacaaaccagacccatgaggaaacgcattttggaataggtctgaattgcggatttagaaaacatgagaacaagtgatatacgtcacaaaactagacaagagtcaggtggaggatcaaaataaagcatgaatttggg

SEQ ID NO: 53721 - DNA, 201 bp, Homo sapiens
ctgaaaagatcctattctaccctgccagccccctctgaggcctcaactcttccccttttccttcccctgcccttaatgctttttcttctttctctgcaggkctcctactccctccctccagtactgcgagaactgtgacacccacttccaagattccaaccaccgcacatccactgctcacctgctgtcactgtcgcaggg

SEQ ID NO: 53722 - DNA, 201 bp, Homo sapiens
ggccagggcagaggtcagagaggcagcagcatgagccccatccaggccctgccagtcacctgcattcccacctccccacctgagctcctctatggacctgytcagagctaaagcctcgtggttcccaacttctcagctcaagaacattctacaataaggtaactcaagcacagataatcaaataactttcccacagtcact

SEQ ID NO: 53723 - DNA, 201 bp, Homo sapiens
actgcaacaatgtcaatgcagaagatgaaactctagactggaaggtgcaaagcaggagaaacagacaacaaaccagacccatgaggaaacgcattttggaataggtctgaattgcggatttagaaaacatgagaacaagtgatatacgtcacaaaactagacaagagtcaggtggaggatcaaaataaagcatgaatttgg

SEQ ID NO: 53724 - DNA, 201 bp, Homo sapiens
aactgcaacaatgtcaatgcagaagatgaaactctagactggaaggtgcaaagcaggagaaacagacaacaaaccagacccatgaggaaacgcattttggaataggtctgaattgcggatttagaaaacatgagaacaagtgatatacgtcacaaaactagacaagagtcaggtggaggatcaaaataaagcatgaatttg

SEQ ID NO: 53725 - DNA, 201 bp, Homo sapiens
ataactgcaacaatgtcaatgcagaagatgaaactctagactggaaggtgcaaagcaggagaaacagacaacaaaccagacccatgaggaaacgcattttggaataggtctgaattgcggatttagaaaacatgagaacaagtgatatacgtcacaaaactagacaagagtcaggtggaggatcaaaataaagcatgaatt

SEQ ID NO: 53726 - DNA, 201 bp, Homo sapiens
cataactgcaacaatgtcaatgcagaagatgaaactctagactggaaggtgcaaagcaggagaaacagacaacaaaccagacccatgaggaaacgcattttggaataggtctgaattgcggatttagaaaacatgagaacaagtgatatacgtcacaaaactagacaagagtcaggtggaggatcaaaataaagcatgaat

SEQ ID NO: 53727 - DNA, 201 bp, Homo sapiens; identical to SEQ ID NO: 28820

SEQ ID NO: 53728 - DNA, 201 bp, Homo sapiens
cacagcaacacgtataggagactctccccgagatcttctagggagtgacccatctatttttgtttgggaagaggaaactccgaaatgggatcgcggaagamttaaagggccaggctgatttttttttcctactggtatgtcttacggggtgggaaagtggtttcagaaagaggctggtgtttattgttggtgaggatgggg

SEQ ID NO: 53729 - DNA, 201 bp, Homo sapiens; identical to SEQ ID NO: 9765

SEQ ID NO: 53730 - DNA, 201 bp, Homo sapiens; identical to SEQ ID NO: 28830

SEQ ID NO: 53731 - DNA, 201 bp, Homo sapiens
agcctggatccctcactgttaagtaggaaggaaggcaatttgtcccttttttttttttttttttttttgagacaaagtctcactcatctcactctgtcgcycaggctggtgtgcaatggtgtgatttcagctcactgcaacctccgcttcctgggctcaagcatattttttgtagaaagcaggctttgccgggacatggtg

SEQ ID NO: 53732 - DNA, 201 bp, Homo sapiens; identical to SEQ ID NO: 28852

SEQ ID NO: 53733 - DNA, 201 bp, Homo sapiens
aactattgaggaacaagtacatgcggcgcagctcagcaaaagacaagcccaggttcagggacagtgtgaccatggggtccaggccatcaggctccgtcccrgcatggaaattggggaggggcagggagaggttcagggcctggtagaaccactgaatctgggagtcagacagaggcagggccaggggcctgtcatggggct

SEQ ID NO: 53734 - DNA, 201 bp, Homo sapiens
cagacagaggcagggccaggggcctgtcatggggctccggcagagagctctggagttgggggcttgaccaggagttgcaataatcgtactgacagcactgrgcctgataccagtactctgcaaagtaggtgttgcgtttttcttggcagcggtaggaaatgtactgtccacagcctcgaacgatgaagcgaaccttgacat

SEQ ID NO: 53735 - DNA, 201 bp, Homo sapiens
acataactgcaacaatgtcaatgcagaagatgaaactctagactggaaggtgcaaagcaggagaaacagacaacaaaccagacccatgaggaaacgcattttggaataggtctgaattgcggatttagaaaacatgagaacaagtgatatacgtcacaaaactagacaagagtcaggtggaggatcaaaataaagcatgaa

SEQ ID NO: 53736 - DNA, 201 bp, Homo sapiens
tacataactgcaacaatgtcaatgcagaagatgaaactctagactggaaggtgcaaagcaggagaaacagacaacaaaccagacccatgaggaaacgcattttggaataggtctgaattgcggatttagaaaacatgagaacaagtgatatacgtcacaaaactagacaagagtcaggtggaggatcaaaataaagcatga

SEQ ID NO: 53737 - DNA, 201 bp, Homo sapiens
tctgccttcccttcacaccttttcagcctctgctccttgctctccctcccaactccctcctcaatacataactgcaacaatgtcaatgcagaagatgaaaytctagactggaaggtgcaaagcaggagaaacagacaacaaaccagacccatgaggaaacgcattttggaataggtctgaattgcggatttagaaaacatg

SEQ ID NO: 53738 - DNA, 201 bp, Homo sapiens
cagtgtgaccatggggtccaggccatcaggctccgtcccagcatggaaattggggaggggcagggagaggttcagggcctggtagaaccactgaatctggkagtcagacagaggcagggccaggggcctgtcatggggctccggcagagagctctggagttgggggcttgaccaggagttgcaataatcgtactgacagca

SEQ ID NO: 53739 - DNA, 201 bp, Homo sapiens; identical to SEQ ID NO: 28855

SEQ ID NO: 53740 - DNA, 201 bp, Homo sapiens; identical to SEQ ID NO: 28857

SEQ ID NO: 53741 - DNA, 201 bp, Homo sapiens; identical to SEQ ID NO: 28859

SEQ ID NO: 53742 - DNA, 201 bp, Homo sapiens
gcagttaaagactacacgatccaggagcacctaggacctggggccaccttcctgcccgctttattggatggagcactgcctccccagtttctgggacaccktggggtgtggccttggtgagtgaaacttggggtgctgcctgctgggaaggaaatccggaaacgcagagaggactctctggtggtgacccaggccttgtca

SEQ ID NO: 53743 - DNA, 201 bp, Homo sapiens
tgctttttcttctttctctgcaggtctcctactccctccctccagtactgcgagaactgtgacacccacttccaagattccaaccaccgcacatccactgytcacctgctgtcactgtcgcagggtcctcagcctcccaaccttccacttggggtgcccatctccagcccgggcttcaaactgctgctgagggggggctgg

SEQ ID NO: 53744 - DNA, 201 bp, Homo sapiens
gattagaatggcgccattttgcggtacggaagctacacagcaacacgtataggagactctccccgagatcttctagggagtgacccatctatttttgtttrggaagaggaaactccgaaatgggatcgcggaagacttaaagggccaggctgatttttttttcctactggtatgtcttacggggtgggaaagtggtttcag

SEQ ID NO: 53745 - DNA, 201 bp, Homo sapiens
agaatcgctaaggtggaagttgcagtgagccaggatcatggcactgcactccaacctgggcagcagagcaagactccatctcaaaaaaaaaaaaaaaaaaagcaggcgttgccattttgcccaggctggtctcaaactcctgagctcaaagccatctgcccgcctctgcctcccaaagtgttgggattacaggcgtgagcc

SEQ ID NO: 53746 - DNA, 201 bp, Homo sapiens; identical to SEQ ID NO: 9774

SEQ ID NO: 53747 - DNA, 201 bp, Homo sapiens
atagagatttgaagagaaaaatagtgcacgcacacacacaaaacaaccctgagggtgcctcaccaggctccaggtccaagatcatgtctagagcttgtcgrtagtgagggacctgctcattgagtccagtaagattaaatttgtcctggatgtagtcttcatccacctgtcaggacatggaagccaagagggaacccatat

SEQ ID NO: 53748 - DNA, 201 bp, Homo sapiens
ccacctgcctcagcctcccaaagtgctagggttacaggcatgagccattgcactcagcccctcctctcttcttgtaccccatgcccggagcagccctgatytgtgagaggagagaagaccaagccattggctgccccaccagcagccccttcctgggaccttatttaccataatagatggtgatcaccatgcacagggatg

SEQ ID NO: 53749 - DNA, 201 bp, Homo sapiens; identical to SEQ ID NO: 28865

SEQ ID NO: 53750 - DNA, 201 bp, Homo sapiens
aagaggctagaaaagtgagctctgctggccccctagaaccttagacccctccttccaagattcttctggttttttttgagacagggtctagctctgttacycaggctggagcatggtggcgcaatcttggctcactgcaacctatgcctcctgagtttaagagatctcccacctcagcctcccgagtagctgggactacag

SEQ ID NO: 53751 - DNA, 201 bp, Homo sapiens
ccctggagtccaacacaccatcaccttcccttccccaacagcaagcaccagcagactagctcatggccttttcttctactttatttcatattcccaccacrataacgactcctttaatttaaactaaaaaccatacagggttcctgaaagggtggcaaaaaagaaaggaaaagtcaaagactgcaggacaggtgggggagg

SEQ ID NO: 53752 - DNA, 201 bp, Homo sapiens
cttatcctcatgtgtaggttgacagggtagtatagtcaagtggttataaacatgagctccctggatttaaagcctgattccacttacttgggcaaacaacytaatgtctacatgttccagttttctcatcttagaaatgggggtagtaagaattgttgttaggattcaatgggttaatatatgtaaaatgctagaatagtg

SEQ ID NO: 53753 - DNA, 201 bp, Homo sapiens; identical to SEQ ID NO: 9758

SEQ ID NO: 53754 - DNA, 201 bp, Homo sapiens
actctttgctgataggaagttttcaaatagcatgtaagagaacagtgtagaagtggaatatgtgaaggaacgtctggtgggaagatatgtgaagctggcamgtagggaggttgaagagaactcacttcacagaagaattcattgccacggagcccacagaaccaggaaatccaggacacctcctctgagctgctcatcttc

SEQ ID NO: 53755 - DNA, 201 bp, Homo sapiens
aattcattgccacggagcccacagaaccaggaaatccaggacacctcctctgagctgctcatcttcacgtcagctagaaaaagaacagtgtcagtaaagckcaagttctccttccctgcctctggtatcctccctcctcccacattcggccctccaaccacgggagaattcggaaccaccctttcttaaagcaacccaaac

SEQ ID NO: 53756 - DNA, 201 bp, Homo sapiens
cggcagggacctcgactcaggctccctaccaatacaagtctctgcatgacccccacgcctttcccaagggtttccaagtttatcattctcaagcaagaacygggctcctccttttctcacgggttgggggcgattgtcaggtccctttcaccggaatccacacatcccccctccgctcctcaggccacctctccctccttc

SEQ ID NO: 53757 - DNA, 201 bp, Homo sapiens; identical to SEQ ID NO: 9761

SEQ ID NO: 53758 - DNA, 201 bp, Homo sapiens; identical to SEQ ID NO: 9762

SEQ ID NO: 53759 - DNA, 201 bp, Homo sapiens
caacctccgcttcctgggctcaagcatattttttgtagaaagcaggctttgccgggacatggtggcatgtgcctgtaatcccggctacttgggaggctgabgcaggagaatcgctaaggtggaagttgcagtgagccaggatcatggcactgcactccaacctgggcagcagagcaagactccatctcaaaaaaaaaaaaa

SEQ ID NO: 53760 - DNA, 201 bp, Homo sapiens; identical to SEQ ID NO: 28885

SEQ ID NO: 53761 - DNA, 201 bp, Homo sapiens; identical to SEQ ID NO: 9766

SEQ ID NO: 53762 - DNA, 201 bp, Homo sapiens
ttgggccccagttttgccactttagcacaggttcgtcggggtttataggggggactctttgctgataggaagttttcaaatagcatgtaagagaacagtgyagaagtggaatatgtgaaggaacgtctggtgggaagatatgtgaagctggcaagtagggaggttgaagagaactcacttcacagaagaattcattgccac

SEQ ID NO: 53763 - DNA, 201 bp, Homo sapiens; identical to SEQ ID NO: 9769

SEQ ID NO: 53764 - DNA, 201 bp, Homo sapiens
gagctccctggatttaaagcctgattccacttacttgggcaaacaacctaatgtctacatgttccagttttctcatcttagaaatgggggtagtaagaatygttgttaggattcaatgggttaatatatgtaaaatgctagaatagtgcatgccgcatagtatgcaatacatgaatgttagctatagtcattatgactaat

SEQ ID NO: 53765 - DNA, 201 bp, Homo sapiens
tagggtgtttgtgtttatggacagtgagggcactgctcttggattcaccagctgttatttttgcttttacttttctcccaccttcagttttttttttttttccacctccactttttaaaagcaaaaaaaaaaaaaagtatgatggtggtgaataaagaccaaagggtcctctctacctttgaaaactctcctggggtggag

SEQ ID NO: 53766 - DNA, 201 bp, Homo sapiens
cttttctgggaaagcctttcatgaagtcttggatgcgaaatggaggagtggtgggggatgtggaaaagaacccaggggcagggggctgtagggggcgaccragtttagggaagcatgagaaacccgggaaaatggggagctgggtttatattaaggtcctggtccttgctaatctcggtttggcggtccggcgcgcacaga

SEQ ID NO: 53767 - DNA, 201 bp, Homo sapiens; identical to SEQ ID NO: 28908

SEQ ID NO: 53768 - DNA, 201 bp, Homo sapiens
ttgctggaagaggccagtgtgataggaaggcccacgattatcaagcttgtacacttagttgaactgggaccagaactctagcccccaaatctaaactttaracttctttgttccacccatttgtctacacttttctttcccacacttccccactctcccaccacccacccccttgtcttgctcatgccgggtggtaggcac

SEQ ID NO: 53769 - DNA, 201 bp, Homo sapiens
gagacggggtttctccatgttggccaagctggtcttgaactcccgacctcaggtgatccgccggcctcggcttcccaaagtgctggggttgcaggcatgarccaccactcccggcccatgttatcaaatattataatgcagggtgataagggaagtcaaggcctctagagatgagaatgggtagggttttgctggaagagg

SEQ ID NO: 53770 - DNA, 201 bp, Homo sapiens; identical to SEQ ID NO: 9759

SEQ ID NO: 53771 - DNA, 201 bp, Homo sapiens; identical to SEQ ID NO: 9760

SEQ ID NO: 53772 - DNA, 201 bp, Homo sapiens
ggcagcctctccaggtggcatgataaggtcacctccctgccaatctgggttcactttcaggtcccagaccctcctgggagtcccccacctattctttcaasccccctggaccaagaattgcccagcttcgtgcaagtctcacttcccccaggaggagttccctgactacagccaattcactgatttcacaaacataagtcc

SEQ ID NO: 53773 - DNA, 201 bp, Homo sapiens
ctgggttcactttcaggtcccagaccctcctgggagtcccccacctattctttcaacccccctggaccaagaattgcccagcttcgtgcaagtctcacttmccccaggaggagttccctgactacagccaattcactgatttcacaaacataagtccatatactatgtgccaagaatacaggtaaagacattcccaaccct

SEQ ID NO: 53774 - DNA, 201 bp, Homo sapiens
ccatgttatcaaatattataatgcagggtgataagggaagtcaaggcctctagagatgagaatgggtagggttttgctggaagaggccagtgtgataggarggcccacgattatcaagcttgtacacttagttgaactgggaccagaactctagcccccaaatctaaactttaaacttctttgttccacccatttgtctac

SEQ ID NO: 53775 - DNA, 201 bp, Homo sapiens
ctcctcggagaattcaggaagtgactgggatagtgccccagaaaccatggaagatgtggggcatcccaagactaaggactcgggggcattgagggtttctrgggctgcttccgaaccaagcaaggaggagccccaagttgagcagctagggagcaaaagaatggattccctcaagtgggaccagcctatctctagcactca

SEQ ID NO: 53776 - DNA, 201 bp, Homo sapiens; identical to SEQ ID NO: 28911

SEQ ID NO: 53777 - DNA, 201 bp, Homo sapiens; identical to SEQ ID NO: 9763

SEQ ID NO: 53778 - DNA, 201 bp, Homo sapiens
gtagatgtaaagaagaggcaactcccttcgcagcccaacccataccactctgtcccccactcctcccacctctgtccagaggccccttctctggactagaygggctctcaaacttctgtgttgcctttcttccaattaggcaggctacaaaccatcagagccatttgttgtttgttccttgaggaagaggcagtctatcac

SEQ ID NO: 53779 - DNA, 201 bp, Homo sapiens
tagccctctaaatcaagggacgaacgctgctggctggagtttgctggacactttcattccacctcctaacaaagagaattcctattccttgaggtcccttrgggcagcagttaaagactacacgatccaggagcacctaggacctggggccaccttcctgcccgctttattggatggagcactgcctccccagtttctggg

SEQ ID NO: 53780 - DNA, 201 bp, Homo sapiens; identical to SEQ ID NO: 9767

SEQ ID NO: 53781 - DNA, 201 bp, Homo sapiens
ggaagcggaagccaggtatggcgttcggggcccgggagtctgggcaatacagttttgtgctcactgggtgaagaggctgacttagggcggggaaaggaggragccaggctggatctctttccgcagctctcctcacgttcccctctagtcccggcgcggcgctgctgcccaggggactggcctatcctcggccaatccgct

SEQ ID NO: 53782 - DNA, 201 bp, Homo sapiens
cactgaatctgggagtcagacagaggcagggccaggggcctgtcatggggctccggcagagagctctggagttgggggcttgaccaggagttgcaataatygtactgacagcactgggcctgataccagtactctgcaaagtaggtgttgcgtttttcttggcagcggtaggaaatgtactgtccacagcctcgaacgatg

SEQ ID NO: 53783 - DNA, 201 bp, Homo sapiens; identical to SEQ ID NO: 9770

SEQ ID NO: 53784 - DNA, 201 bp, Homo sapiens
ttctactttatttcatattcccaccacgataacgactcctttaatttaaactaaaaaccatacagggttcctgaaagggtggcaaaaaagaaaggaaaagwcaaagactgcaggacaggtgggggagggaatcagcgaatcgtcttgactgggctcttgaagttgctggcggcttggagctgcagctggtaggccatcgga

SEQ ID NO: 53785 - DNA, 201 bp, Homo sapiens
aggactcgggggcattgagggtttctagggctgcttccgaaccaagcaaggaggagccccaagttgagcagctagggagcaaaagaatggattccctcaastgggaccagcctatctctagcactcaagagtctgggagactggaggctggaggggccagtcccaaactcagatgggatcatgtggattcaggtggcacca

SEQ ID NO: 53786 - DNA, 201 bp, Homo sapiens; identical to SEQ ID NO: 9771

SEQ ID NO: 53787 - DNA, 201 bp, Homo sapiens
cttctgagatgagcagtctcagctccaccagcggcaggcacacacacatcactgagcagcaattccggaccttgtcccacctcgttccaccctttagttakactgactttaggctacttttcctttagaactaaaactaaaagatggagctgctgattaagccccttacagtataaacagacagtcatagatatccaaaca

SEQ ID NO: 53788 - DNA, 201 bp, Homo sapiens
tgaactattgaggaacaagtacatgcggcgcagctcagcaaaagacaagcccaggttcagggacagtgtgaccatggggtccaggccatcaggctccgtcscagcatggaaattggggaggggcagggagaggttcagggcctggtagaaccactgaatctgggagtcagacagaggcagggccaggggcctgtcatgggg

SEQ ID NO: 53789 - DNA, 201 bp, Homo sapiens
aagtccatatactatgtgccaagaatacaggtaaagacattcccaaccctcaaagagttcacagctggagagggaaagtgccatgttatcaatttttttcytttttttttgagatgcagtttcgctctcattgcccaggctggagtgcaatggcatgatctcggctcaccacaacctctgccccccgagttcaagggattc

SEQ ID NO: 53790 - DNA, 201 bp, Homo sapiens; identical to SEQ ID NO: 28498

SEQ ID NO: 53791 - DNA, 201 bp, Homo sapiens; identical to SEQ ID NO: 28499

SEQ ID NO: 53792 - DNA, 201 bp, Homo sapiens; identical to SEQ ID NO: 28501

SEQ ID NO: 53793 - DNA, 201 bp, Homo sapiens; identical to SEQ ID NO: 53658

SEQ ID NO: 53794 - DNA, 201 bp, Homo sapiens; identical to SEQ ID NO: 53661

SEQ ID NO: 53795 - DNA, 201 bp, Homo sapiens; identical to SEQ ID NO: 53662

SEQ ID NO: 53796 - DNA, 201 bp, Homo sapiens; identical to SEQ ID NO: 28505

SEQ ID NO: 53797 - DNA, 201 bp, Homo sapiens; identical to SEQ ID NO: 53664

SEQ ID NO: 53798 - DNA, 201 bp, Homo sapiens; identical to SEQ ID NO: 53665

SEQ ID NO: 53799 - DNA, 201 bp, Homo sapiens; identical to SEQ ID NO: 53667

SEQ ID NO: 53800 - DNA, 201 bp, Homo sapiens; identical to SEQ ID NO: 53668

SEQ ID NO: 53801 - DNA, 201 bp, Homo sapiens; identical to SEQ ID NO: 53670

SEQ ID NO: 53802 - DNA, 201 bp, Homo sapiens; identical to SEQ ID NO: 28514

SEQ ID NO: 53803 - DNA, 201 bp, Homo sapiens; identical to SEQ ID NO: 28516

SEQ ID NO: 53804 - DNA, 201 bp, Homo sapiens; identical to SEQ ID NO: 53676

SEQ ID NO: 53805 - DNA, 201 bp, Homo sapiens; identical to SEQ ID NO: 28525

SEQ ID NO: 53806 - DNA, 201 bp, Homo sapiens; identical to SEQ ID NO: 53682

SEQ ID NO: 53807 - DNA, 201 bp, Homo sapiens; identical to SEQ ID NO: 53684

SEQ ID NO: 53808 - DNA, 201 bp, Homo sapiens; identical to SEQ ID NO: 53685

SEQ ID NO: 53809 - DNA, 201 bp, Homo sapiens; identical to SEQ ID NO: 53686

SEQ ID NO: 53810 - DNA, 201 bp, Homo sapiens; identical to SEQ ID NO: 9744

SEQ ID NO: 53811 - DNA, 201 bp, Homo sapiens; identical to SEQ ID NO: 9745

SEQ ID NO: 53812 - DNA, 201 bp, Homo sapiens; identical to SEQ ID NO: 9746

SEQ ID NO: 53813 - DNA, 201 bp, Homo sapiens; identical to SEQ ID NO: 53691

SEQ ID NO: 53814 - DNA, 201 bp, Homo sapiens; identical to SEQ ID NO: 53692

SEQ ID NO: 53815 - DNA, 201 bp, Homo sapiens; identical to SEQ ID NO: 53693

SEQ ID NO: 53816 - DNA, 201 bp, Homo sapiens; identical to SEQ ID NO: 9737

SEQ ID NO: 53817 - DNA, 201 bp, Homo sapiens; identical to SEQ ID NO: 9738

SEQ ID NO: 53818 - DNA, 201 bp, Homo sapiens; identical to SEQ ID NO: 9739

SEQ ID NO: 53819 - DNA, 201 bp, Homo sapiens; identical to SEQ ID NO: 9740

SEQ ID NO: 53820 - DNA, 201 bp, Homo sapiens; identical to SEQ ID NO: 53701

SEQ ID NO: 53821 - DNA, 201 bp, Homo sapiens; identical to SEQ ID NO: 9743

SEQ ID NO: 53822 - DNA, 201 bp, Homo sapiens; identical to SEQ ID NO: 53704

SEQ ID NO: 53823 - DNA, 201 bp, Homo sapiens; identical to SEQ ID NO: 28552

SEQ ID NO: 53824 - DNA, 201 bp, Homo sapiens; identical to SEQ ID NO: 28555

SEQ ID NO: 53825 - DNA, 201 bp, Homo sapiens; identical to SEQ ID NO: 28556

SEQ ID NO: 53826 - DNA, 201 bp, Homo sapiens; identical to SEQ ID NO: 28557

SEQ ID NO: 53827 - DNA, 201 bp, Homo sapiens; identical to SEQ ID NO: 9824

SEQ ID NO: 53828 - DNA, 201 bp, Homo sapiens; identical to SEQ ID NO: 53713

SEQ ID NO: 53829 - DNA, 201 bp, Homo sapiens; identical to SEQ ID NO: 53714

SEQ ID NO: 53830 - DNA, 201 bp, Homo sapiens; identical to SEQ ID NO: 53659

SEQ ID NO: 53831 - DNA, 201 bp, Homo sapiens; identical to SEQ ID NO: 53660

SEQ ID NO: 53832 - DNA, 201 bp, Homo sapiens; identical to SEQ ID NO: 53663

SEQ ID NO: 53833 - DNA, 201 bp, Homo sapiens; identical to SEQ ID NO: 28506

SEQ ID NO: 53834 - DNA, 201 bp, Homo sapiens; identical to SEQ ID NO: 28507

SEQ ID NO: 53835 - DNA, 201 bp, Homo sapiens; identical to SEQ ID NO: 53669

SEQ ID NO: 53836 - DNA, 201 bp, Homo sapiens; identical to SEQ ID NO: 53671

SEQ ID NO: 53837 - DNA, 201 bp, Homo sapiens; identical to SEQ ID NO: 28509

SEQ ID NO: 53838 - DNA, 201 bp, Homo sapiens; identical to SEQ ID NO: 28510

SEQ ID NO: 53839 - DNA, 201 bp, Homo sapiens; identical to SEQ ID NO: 28511

SEQ ID NO: 53840 - DNA, 201 bp, Homo sapiens; identical to SEQ ID NO: 28512

SEQ ID NO: 53841 - DNA, 201 bp, Homo sapiens; identical to SEQ ID NO: 28518

SEQ ID NO: 53842 - DNA, 201 bp, Homo sapiens; identical to SEQ ID NO: 53677

SEQ ID NO: 53843 - DNA, 201 bp, Homo sapiens; identical to SEQ ID NO: 28523

SEQ ID NO: 53844 - DNA, 201 bp, Homo sapiens; identical to SEQ ID NO: 28526

SEQ ID NO: 53845 - DNA, 201 bp, Homo sapiens; identical to SEQ ID NO: 28530

SEQ ID NO: 53846 - DNA, 201 bp, Homo sapiens; identical to SEQ ID NO: 28533

SEQ ID NO: 53847 - DNA, 201 bp, Homo sapiens; identical to SEQ ID NO: 28534

SEQ ID NO: 53848 - DNA, 201 bp, Homo sapiens; identical to SEQ ID NO: 28535

SEQ ID NO: 53849 - DNA, 201 bp, Homo sapiens; identical to SEQ ID NO: 28536

SEQ ID NO: 53850 - DNA, 201 bp, Homo sapiens; identical to SEQ ID NO: 28537

SEQ ID NO: 53851 - DNA, 201 bp, Homo sapiens; identical to SEQ ID NO: 28538

SEQ ID NO: 53852 - DNA, 201 bp, Homo sapiens; identical to SEQ ID NO: 28540

SEQ ID NO: 53853 - DNA, 201 bp, Homo sapiens; identical to SEQ ID NO: 28541

SEQ ID NO: 53854 - DNA, 201 bp, Homo sapiens; identical to SEQ ID NO: 28542

SEQ ID NO: 53855 - DNA, 201 bp, Homo sapiens; identical to SEQ ID NO: 9829

SEQ ID NO: 53856 - DNA, 201 bp, Homo sapiens; identical to SEQ ID NO: 28544

SEQ ID NO: 53857 - DNA, 201 bp, Homo sapiens; identical to SEQ ID NO: 28547

SEQ ID NO: 53858 - DNA, 201 bp, Homo sapiens; identical to SEQ ID NO: 28549

SEQ ID NO: 53859 - DNA, 201 bp, Homo sapiens; identical to SEQ ID NO: 9742

SEQ ID NO: 53860 - DNA, 201 bp, Homo sapiens; identical to SEQ ID NO: 28551

SEQ ID NO: 53861 - DNA, 201 bp, Homo sapiens; identical to SEQ ID NO: 9822

SEQ ID NO: 53862 - DNA, 201 bp, Homo sapiens; identical to SEQ ID NO: 28554

SEQ ID NO: 53863 - DNA, 201 bp, Homo sapiens; identical to SEQ ID NO: 28553

SEQ ID NO: 53864 - DNA, 201 bp, Homo sapiens; identical to SEQ ID NO: 53709

SEQ ID NO: 53865 - DNA, 201 bp, Homo sapiens; identical to SEQ ID NO: 9748

SEQ ID NO: 53866 - DNA, 201 bp, Homo sapiens; identical to SEQ ID NO: 28559

SEQ ID NO: 53867 - DNA, 201 bp, Homo sapiens
cccttcctgggaaggggtgggctggaactgggaactgttctgagatggctcccttttcttgggtggggagtaagtcgccccattgttggaagcaggaggaytcctttgtctgggggcctcagttttctttctccgtgaatagtgaggacctttatgttgggcaagggctttgtctctgccatcccttcacctttatcccac

SEQ ID NO: 53868 - DNA, 201 bp, Homo sapiens; identical to SEQ ID NO: 53718

SEQ ID NO: 53869 - DNA, 201 bp, Homo sapiens
gtagggtgtgaggtagaatggggtgtgagtggggtcagcacttctctgtgttctaggtaagtttgttcctgtcaattgggaaccccctcaaccacttccaytccccaaatacctgcgctgctaccgatgcctcttggagaccaaggagttagggtgccttctgggatctgacatctgcctcaccccagctggcagcagctg

SEQ ID NO: 53870 - DNA, 201 bp, Homo sapiens
tcatgacttaattatcattggtttggtattttccgtcagagtacaggccacacagatttgttaacacgtgtgcaaaacactatataggtaaaagcagatgygtacgatgccatttccatcaagcacagacagaactcatctaagctactaccagtcaggacagcggctaccccagagctgggaagagcacctgggagaggg

SEQ ID NO: 53871 - DNA, 201 bp, Homo sapiens; identical to SEQ ID NO: 53750

SEQ ID NO: 53872 - DNA, 201 bp, Homo sapiens
ccactcacctgagggctggggtctaggaggttgtgaaggcagcattgggagccatgcccccatccccacagtgcggggctagcaggagaggaggaggtagrtctcattgtacacatccgtcttctggagagaacaacctctcctaccatcccttccttctacaccttctctgcctgtcataggtggctgcaggaggggtcc

SEQ ID NO: 53873 - DNA, 201 bp, Homo sapiens
acacactcctgactttgccctttctcctgcagggggtgccattcccgcagaatgaggctaatgccatggatgtggtggtccagtttgccatccaccgcctrggcttccagccccaggacatcatcatctacgcctggtccatcggcggcttcactggtaccagcctccctcccatcccccactgtagacacattcatgacc

SEQ ID NO: 53874 - DNA, 201 bp, Homo sapiens
ctaggccttcagcccctaacctgagctttcctcaggcagcaggtccccaaacctccccggtccctgatgtgcctactgttatcacaactgtgcagcctccytggcccctcccgcctccttcttcagttcttcctgcatacaaccaccccaggagcccatggttgccccctcctgcttacggctcatgagctttctaggatc

SEQ ID NO: 53875 - DNA, 201 bp, Homo sapiens
tccccaaacctccccggtccctgatgtgcctactgttatcacaactgtgcagcctccctggcccctcccgcctccttcttcagttcttcctgcatacaacmaccccaggagcccatggttgccccctcctgcttacggctcatgagctttctaggatccgatttcacctacccagtgcttctgctggtttccaggttcaac

SEQ ID NO: 53876 - DNA, 201 bp, Homo sapiens
aacgcaatctcgagccgctcccccaacaaaccgtggccctctcccgaccgggtcatctacagccccgcccctcgtttgcctggctccattcccctaacctkggcgttctgtcctcaggccccgccttctttgtttcgtcactcggttgcttaccctcaggtatcccttaactctaggtaggagcactcagaagggacaccg

SEQ ID NO: 53877 - DNA, 201 bp, Homo sapiens
acggtaggttgaggctgcagtgagctgtgatcgtgccaccggactccagcttgggtgacagagtgagactctgtctcaaaaaaaaaaaaaaaaagcaaataggggtgcccagtctcacctcccataccctggggacaaaggacacccctccctggacatggccattagggactctgctgaactgcccctactgccactttc

SEQ ID NO: 53878 - DNA, 201 bp, Homo sapiens
aagggggctgcgaaaggaccaggcccaggtagaaggaggtgggtgagaaggccactctttttttgagacagtctcactgtcacctaggctggagtgcagtsgtgtgatcttggctcattgcaacttctgcctcccaggttcaagtgattcttctgcctcagcctcccgagtagctgggattacaagcacatgccaccacac

SEQ ID NO: 53879 - DNA, 201 bp, Homo sapiens
ctcccgggttcaagcgattctcatgcctcagcctcccgaataactgggattacaggcataagccaccaagcccagctaatttttgtatatttagtagagayggggtttcaccatgttggccaggctggtctcgaactcctgacctcaggtacctgcccgccttggcctcccaaagtgctgggattacaggcgtgagccacc

SEQ ID NO: 53880 - DNA, 201 bp, Homo sapiens
tgcaacctccacctcccgggttcaagcgattctcatgcctcagcctcccgaataactgggattacaggcataagccaccaagcccagctaatttttgtatwtttagtagagacggggtttcaccatgttggccaggctggtctcgaactcctgacctcaggtacctgcccgccttggcctcccaaagtgctgggattacag

SEQ ID NO: 53881 - DNA, 201 bp, Homo sapiens
ctgcaacctccacctcccgggttcaagcgattctcatgcctcagcctcccgaataactgggattacaggcataagccaccaagcccagctaatttttgtawatttagtagagacggggtttcaccatgttggccaggctggtctcgaactcctgacctcaggtacctgcccgccttggcctcccaaagtgctgggattaca

SEQ ID NO: 53882 - DNA, 201 bp, Homo sapiens
aggccgagaggaagcgacaaacgccaagtgcaatggagagggctctgcaatcctatttggatcccaaacctcactaaccctttttttttttttttttttttgagacacagtttcactcttgttgcccaggctggagtgcaatggtgcaatctcggctcatcgccacctccaccttccaggttcaagtgattctccggcctc

SEQ ID NO: 53883 - DNA, 201 bp, Homo sapiens
ccagtcattcatttatatttaggttaaagaccctctctctggttcctctctagaacgcaatctcgagccgctcccccaacaaaccgtggccctctcccgaycgggtcatctacagccccgcccctcgtttgcctggctccattcccctaaccttggcgttctgtcctcaggccccgccttctttgtttcgtcactcggttg

SEQ ID NO: 53884 - DNA, 201 bp, Homo sapiens
gaggatcacggtaggttgaggctgcagtgagctgtgatcgtgccaccggactccagcttgggtgacagagtgagactctgtctcaaaaaaaaaaaaaaaaagcaaataggggtgcccagtctcacctcccataccctggggacaaaggacacccctccctggacatggccattagggactctgctgaactgcccctactgc

SEQ ID NO: 53885 - DNA, 201 bp, Homo sapiens
tgaggatcacggtaggttgaggctgcagtgagctgtgatcgtgccaccggactccagcttgggtgacagagtgagactctgtctcaaaaaaaaaaaaaaaaagcaaataggggtgcccagtctcacctcccataccctggggacaaaggacacccctccctggacatggccattagggactctgctgaactgcccctactg

SEQ ID NO: 53886 - DNA, 201 bp, Homo sapiens
tctcctgtcatgggcccagcactctcccaaacggaaactctctcagcctcctaagctgcaccccaagtcttgttcccataatcccataagacattgctccratcctgtcttttttttttttgctgctctgtcacccaggctggagtgcagtggcgcaatcttggctcactgcaacctccacctccccagttcaagcaattc

SEQ ID NO: 53887 - DNA, 201 bp, Homo sapiens
ttcccgatgcctgctcttccaccgaccccccacctttcttaagttagcaaaaacgtaacacataatatgtgctaggcactgttctaaacacttgcaatccrctgaggcaggtattattactatgtgcattttacagatgaggaaacaggtgcagaaaggtcataaccttgcctgagtctcacagatgctgagccagaattt

SEQ ID NO: 53888 - DNA, 201 bp, Homo sapiens
caagctccgcctcctgggttcacgccattctcctgcctcagcctccctagtacctgggactacaggcgcctgccaccacgcctggctaattttttgtattyttagtagagacggggtttcactgtgttagccaggatggtctcgatctcctgacctcgtgatccacccgcctctgcctcccaaagtgctgggattacaggc

SEQ ID NO: 53889 - DNA, 201 bp, Homo sapiens
tgtttatagtttgtggaaagtgggggaccatcccccttctcaccactgttcctcttgcacgtttcccctcattcatgtggctgtacttaaccttctccaayatacatcctgcattacatgaatggattattcctaataattaataaaaaggtattttttctactatcaggctaattgtataacttctcaagtgtccaggga

SEQ ID NO: 53890 - DNA, 201 bp, Homo sapiens
cataagacattgctccaatcctgtcttttttttttttgctgctctgtcacccaggctggagtgcagtggcgcaatcttggctcactgcaacctccacctcyccagttcaagcaattcttgtgcctcagtctcccaagcagctgggattaaaggtgcacgccaccacgcccagctaattttttgtatttttagtagagatgg

SEQ ID NO: 53891 - DNA, 201 bp, Homo sapiens
caggcgtgagccaccgtgcccagcctctcttcccttttcttcagagccacactctgtctccacttccactaaccttctctcctcaatctgtagctgaatakcttctaccctatcaaggtgcgcagctttgacggggaccctccagatctccaggtgcccttgcctgtcctcaagctgtctgcttccgcatctgtctgcagt

SEQ ID NO: 53892 - DNA, 201 bp, Homo sapiens
cccctagggagatgggtgtcaggactcagtgaagtgaaatggggccgaggaagccagagactgacaagagagcaagagaggacaggaggcagaacaacacyaggacaggcgggggttggtggagacagtgaggcagggacacaaaattgccaagtcaggacatctgcacagaattctattcctcatccttttttttggaga

SEQ ID NO: 53893 - DNA, 201 bp, Homo sapiens
gtgaggacctttatgttgggcaagggctttgtctctgccatcccttcacctttatcccactctagggggcctggtgaccaggaccgtgaggcagcatctcwatctaaacaacgcggagcagctgtgcaggtgagggccggccagcgtccggcattgaacacctgccccccatacagctctgctgggcgctcaaaccctgaa

SEQ ID NO: 53894 - DNA, 201 bp, Homo sapiens
ggcagcactctgccctccccacatcattgctggtggacttgtctcccctactagactgtgccctgtgagggtggagactttgtgcagggttgtatccccarcatctgatgcagtgattcaataaacatctgtccaattaataggaaagacagttccttttctcattcccctattgctggtcccctgccctcaagcaggatg

SEQ ID NO: 53895 - DNA, 201 bp, Homo sapiens
agccgcttcgggctccggatgtccgctggggcccgacgcttgggtcccgacgcgcggttcgcactttccaggtttcttccccagggaacagagcttgagcsgggggccacccccccgtcctaccggagttctgaggtgcggtcaggcgcggagagcggacgcccagcgccagattctgtgggctccggagttcaggcccac

SEQ ID NO: 53896 - DNA, 201 bp, Homo sapiens; identical to SEQ ID NO: 9835

SEQ ID NO: 53897 - DNA, 201 bp, Homo sapiens
cacagacagaactcatctaagctactaccagtcaggacagcggctaccccagagctgggaagagcacctgggagaggggaacagaggcaggcttggctgcrggtaaaggtcttcacgctgatttggtggctggttacacagatgtgtggtttacaaaaatccatcttgtgatatgtgcaagcttctgaatgttttaccaaa

SEQ ID NO: 53898 - DNA, 201 bp, Homo sapiens
ccattggagggaggagaggggctgtggatttcttgaaggcgtcccactcacctgagggctggggtctaggaggttgtgaaggcagcattgggagccatgcycccatccccacagtgcggggctagcaggagaggaggaggtagatctcattgtacacatccgtcttctggagagaacaacctctcctaccatcccttcctt

SEQ ID NO: 53899 - DNA, 201 bp, Homo sapiens
attctccggcctcagcctcccgagtagctgtaattacaggtatgcgctaccaagcccggctaattttgtatttttagtagcgatggggtttctccatattrgtcaggctggtctcaaactcccaatctcaggtgatccgcctgcctcagcctcccaaagtgctgggattacaggcgtgagccactgcgccaggcattaacc

SEQ ID NO: 53900 - DNA, 201 bp, Homo sapiens
tggtcagccattggagggaggagaggggctgtggatttcttgaaggcgtcccactcacctgagggctggggtctaggaggttgtgaaggcagcattgggakccatgcccccatccccacagtgcggggctagcaggagaggaggaggtagatctcattgtacacatccgtcttctggagagaacaacctctcctaccatcc

SEQ ID NO: 53901 - DNA, 201 bp, Homo sapiens
cactgcaacctctgcctcccgggttcaagtgattctcctgtctcagcctcctgagtagctgggattacagaggtgtgccaccacacccagctgatttttcwatttttaatagagagcgggttttaccatgttggccaggctggtctcaaactcccaatctcaagtgatccgcccacctcggcctcccaaagtgctgggatt

SEQ ID NO: 53902 - DNA, 201 bp, Homo sapiens
tagtagcatcccactgtaaacattattccacatttaagttaggggaactgaatgttccgatatcagtttgtaaacagcttccttgttttattgacctgctstatactactccatagcatgcgcatatcacagctgatttccccatcccactattgatgggcattttggtcatttctctcaagcagggcagcagcaaacatc

SEQ ID NO: 53903 - DNA, 201 bp, Homo sapiens
agatatttgcactgtggaattcaggaagggtgaggtgtcaagagtccagcctggggaagaaccaaaagtcctgaactattgaggaacaagtacatgcggcrcagctcagcaaaagacaagcccaggttcagggacagtgtgaccatggggtccaggccatcaggctccgtcccagcatggaaattggggaggggcagggag

SEQ ID NO: 53904 - DNA, 201 bp, Homo sapiens; identical to SEQ ID NO: 53733

SEQ ID NO: 53905 - DNA, 201 bp, Homo sapiens
ctcattcatgtggctgtacttaaccttctccaacatacatcctgcattacatgaatggattattcctaataattaataaaaaggtattttttctactatcwggctaattgtataacttctcaagtgtccagggagccaggggcaggtagtggggagagcagaggccccaaagagctgggctttgggaaaccctaactctag

SEQ ID NO: 53906 - DNA, 201 bp, Homo sapiens; identical to SEQ ID NO: 53734

SEQ ID NO: 53907 - DNA, 201 bp, Homo sapiens
cccaggtcctgggtggggagatcagggaaagtgaatgtttcctgcccattatcttcagtgcactatctccagtgttctatccccatcctctccagatagtyccctaaccaagtgaagtaggttaagaaaaaaacaagggataacatagggggaatggggttggcctatagggtcagtgggatgagagcatgggtggtgggg

SEQ ID NO: 53908 - DNA, 201 bp, Homo sapiens
gaatggggtgtgagtggggtcagcacttctctgtgttctaggtaagtttgttcctgtcaattgggaaccccctcaaccacttccattccccaaatacctgygctgctaccgatgcctcttggagaccaaggagttagggtgccttctgggatctgacatctgcctcaccccagctggcagcagctgcatcactctccacaa

SEQ ID NO: 53909 - DNA, 201 bp, Homo sapiens
caactgggactcattatggaagaatggggtgagaggagacatgaggaaagaccctcttatttgtgattctctgtgttcatgttgctgtttatagtttgtgkaaagtgggggaccatcccccttctcaccactgttcctcttgcacgtttcccctcattcatgtggctgtacttaaccttctccaacatacatcctgcatta

SEQ ID NO: 53910 - DNA, 201 bp, Homo sapiens
gtcatctctctccctgaccagcctcaatttatagccgatgggaggtggaagaggactggtgtctgtctgtcctccgctcctaccaggcagaacacgggccygacttcccctggagcgtgggtaaggagctcctggggcaggagagagggtgggaagggcctaggaaggggatgaatacccagatgtgtggcctattttgag

SEQ ID NO: 53911 - DNA, 201 bp, Homo sapiens
agaagggacaccgtcatctgctgctgtcgccatggcgattattcaacgccctgcctcttcaccccaggaaaaccttcgcggaacccgtcaccatggaaacsaactctctggactcttagcgcgccctgggctggccctgctgggtggacaggagaggagcaaaacgcaacaaagacgggattaattactcggaggccgcgc

SEQ ID NO: 53912 - DNA, 201 bp, Homo sapiens
actctcccaaacggaaactctctcagcctcctaagctgcaccccaagtcttgttcccataatcccataagacattgctccaatcctgtcttttttttttttgctgctctgtcacccaggctggagtgcagtggcgcaatcttggctcactgcaacctccacctccccagttcaagcaattcttgtgcctcagtctcccaag

SEQ ID NO: 53913 - DNA, 201 bp, Homo sapiens; identical to SEQ ID NO: 53738

SEQ ID NO: 53914 - DNA, 201 bp, Homo sapiens
ctactcgggaggctgaggcaggagaatcgctggaacccgggaggtggaggttgtagtgagcagagatcatgccactgcactccaccctgggtgacagagcragactttgtctcaaacaaacaaaaaaacagcaccagagttcaagagagaaaattacacaaaagtcatatagatgctagtggtacaacagacggaggccta

SEQ ID NO: 53915 - DNA, 201 bp, Homo sapiens
aggaaccactgtgcctttctcaggtcagcctgtctgggcagaatccacactagagattcttttctagggggaagaacagcaccagagctcagacaggcacrgtggctcacacctgtaatcccggcactttgggaggtcgaggagggcagattacgaggtcaggagttcgagaccagcctgaccaacatggtgaaaccccgt

SEQ ID NO: 53916 - DNA, 201 bp, Homo sapiens
aggaatggaggaaccactgtgcctttctcaggtcagcctgtctgggcagaatccacactagagattcttttctagggggaagaacagcaccagagctcagmcaggcacagtggctcacacctgtaatcccggcactttgggaggtcgaggagggcagattacgaggtcaggagttcgagaccagcctgaccaacatggtga

SEQ ID NO: 53917 - DNA, 201 bp, Homo sapiens
tggtcaggctggtctcaaactcccaatctcaggtgatccgcctgcctcagcctcccaaagtgctgggattacaggcgtgagccactgcgccaggcattaamcctctttaatctgtgtttacctgcccacacctgagcctgaccccacaaacaatgtgacacagttttagcccagtcccagtttattgtggaggaaaatggg

SEQ ID NO: 53918 - DNA, 201 bp, Homo sapiens
gatttttctatttttaatagagagcgggttttaccatgttggccaggctggtctcaaactcccaatctcaagtgatccgcccacctcggcctcccaaagtkctgggattaccggcgtgagccaccatgcccggcctcctcgtccttcttgctgctagttcagtctggtactgggtcttagagacatggacaagacagggga

SEQ ID NO: 53919 - DNA, 201 bp, Homo sapiens; identical to SEQ ID NO: 53782

SEQ ID NO: 53920 - DNA, 201 bp, Homo sapiens
gtttacaaaaatccatcttgtgatatgtgcaagcttctgaatgttttaccaaaaaggtttgaaaataagtaaatcagccaggtgagcatggtggtgtgcawctgtagtcccagctacttggaggctgaggcagaagaatctcttgagcccaggagttcaaggccagcttgggcaacatagtaagaaccttagaaaaaaaag

SEQ ID NO: 53921 - DNA, 201 bp, Homo sapiens; identical to SEQ ID NO: 53788

SEQ ID NO: 53922 - DNA, 201 bp, Homo sapiens
agggacccccagctctgctgagctgtcctcttgtcctgccttggtatgtgatttgctctagacacaaaaagagaaagaggaaatgaaagccctcctatggygaatgccagaaagttagtgggcatcctcggcagtgctgtcagaccagagctgtgtgggggctaggggcgtttagagggctatgttggtgggaagggggct

SEQ ID NO: 53923 - DNA, 201 bp, Homo sapiens; identical to SEQ ID NO: 53748

SEQ ID NO: 53924 - DNA, 201 bp, Homo sapiens; identical to SEQ ID NO: 17594

SEQ ID NO: 53925 - DNA, 201 bp, Homo sapiens; identical to SEQ ID NO: 16958

SEQ ID NO: 53926 - DNA, 201 bp, Homo sapiens; identical to SEQ ID NO: 16959

SEQ ID NO: 53927 - DNA, 201 bp, Homo sapiens; identical to SEQ ID NO: 16960

SEQ ID NO: 53928 - DNA, 201 bp, Homo sapiens; identical to SEQ ID NO: 16961

SEQ ID NO: 53929 - DNA, 201 bp, Homo sapiens; identical to SEQ ID NO: 16963

SEQ ID NO: 53930 - DNA, 201 bp, Homo sapiens; identical to SEQ ID NO: 16964

SEQ ID NO: 53931 - DNA, 201 bp, Homo sapiens; identical to SEQ ID NO: 16965

SEQ ID NO: 53932 - DNA, 201 bp, Homo sapiens; identical to SEQ ID NO: 16966

SEQ ID NO: 53933 - DNA, 201 bp, Homo sapiens; identical to SEQ ID NO: 16967

SEQ ID NO: 53934 - DNA, 201 bp, Homo sapiens; identical to SEQ ID NO: 16788

SEQ ID NO: 53935 - DNA, 201 bp, Homo sapiens; identical to SEQ ID NO: 17134

SEQ ID NO: 53936 - DNA, 201 bp, Homo sapiens; identical to SEQ ID NO: 16969

SEQ ID NO: 53937 - DNA, 201 bp, Homo sapiens; identical to SEQ ID NO: 16970

SEQ ID NO: 53938 - DNA, 201 bp, Homo sapiens; identical to SEQ ID NO: 17137

SEQ ID NO: 53939 - DNA, 201 bp, Homo sapiens; identical to SEQ ID NO: 17569

SEQ ID NO: 53940 - DNA, 201 bp, Homo sapiens; identical to SEQ ID NO: 17020

SEQ ID NO: 53941 - DNA, 201 bp, Homo sapiens; identical to SEQ ID NO: 17021

SEQ ID NO: 53942 - DNA, 201 bp, Homo sapiens; identical to SEQ ID NO: 17022

SEQ ID NO: 53943 - DNA, 201 bp, Homo sapiens; identical to SEQ ID NO: 17023

SEQ ID NO: 53944 - DNA, 201 bp, Homo sapiens; identical to SEQ ID NO: 17461

SEQ ID NO: 53945 - DNA, 201 bp, Homo sapiens; identical to SEQ ID NO: 17339

SEQ ID NO: 53946 - DNA, 201 bp, Homo sapiens; identical to SEQ ID NO: 17342

SEQ ID NO: 53947 - DNA, 201 bp, Homo sapiens; identical to SEQ ID NO: 17711

SEQ ID NO: 53948 - DNA, 201 bp, Homo sapiens; identical to SEQ ID NO: 16691

SEQ ID NO: 53949 - DNA, 201 bp, Homo sapiens; identical to SEQ ID NO: 17346

SEQ ID NO: 53950 - DNA, 201 bp, Homo sapiens; identical to SEQ ID NO: 16748

SEQ ID NO: 53951 - DNA, 201 bp, Homo sapiens; identical to SEQ ID NO: 16749

SEQ ID NO: 53952 - DNA, 201 bp, Homo sapiens; identical to SEQ ID NO: 16750

SEQ ID NO: 53953 - DNA, 201 bp, Homo sapiens; identical to SEQ ID NO: 16751

SEQ ID NO: 53954 - DNA, 201 bp, Homo sapiens; identical to SEQ ID NO: 16942

SEQ ID NO: 53955 - DNA, 201 bp, Homo sapiens; identical to SEQ ID NO: 16944

SEQ ID NO: 53956 - DNA, 201 bp, Homo sapiens; identical to SEQ ID NO: 16945

SEQ ID NO: 53957 - DNA, 201 bp, Homo sapiens; identical to SEQ ID NO: 16946

SEQ ID NO: 53958 - DNA, 201 bp, Homo sapiens; identical to SEQ ID NO: 17791

SEQ ID NO: 53959 - DNA, 201 bp, Homo sapiens; identical to SEQ ID NO: 16947

SEQ ID NO: 53960 - DNA, 201 bp, Homo sapiens; identical to SEQ ID NO: 17793

SEQ ID NO: 53961 - DNA, 201 bp, Homo sapiens; identical to SEQ ID NO: 17102

SEQ ID NO: 53962 - DNA, 201 bp, Homo sapiens; identical to SEQ ID NO: 17794

SEQ ID NO: 53963 - DNA, 201 bp, Homo sapiens; identical to SEQ ID NO: 17795

SEQ ID NO: 53964 - DNA, 201 bp, Homo sapiens; identical to SEQ ID NO: 17503

SEQ ID NO: 53965 - DNA, 201 bp, Homo sapiens; identical to SEQ ID NO: 17796

SEQ ID NO: 53966 - DNA, 201 bp, Homo sapiens; identical to SEQ ID NO: 17797

SEQ ID NO: 53967 - DNA, 201 bp, Homo sapiens; identical to SEQ ID NO: 17798

SEQ ID NO: 53968 - DNA, 201 bp, Homo sapiens; identical to SEQ ID NO: 17469

SEQ ID NO: 53969 - DNA, 201 bp, Homo sapiens; identical to SEQ ID NO: 17367

SEQ ID NO: 53970 - DNA, 201 bp, Homo sapiens; identical to SEQ ID NO: 16711

SEQ ID NO: 53971 - DNA, 201 bp, Homo sapiens
ggttagatcctgcttttcacacaagattatatcactggtagctgcacaggatgcttccagaacattagaaggccaaaaataagcaaggaaatatggttggytcaatgtttacatttatttcaaaaagaatagttcaatctggtgcgtagctgcagacacatatataaatattaaaagcacactatgttttttatttatgat

SEQ ID NO: 53972 - DNA, 201 bp, Homo sapiens
aaaatactaactaactaaacaaaacaaacctctaaattcagaaaacagtatatgttattgtctctatagcttttgtagtctcctcctgagtggcagtgaartggcactgaatctgattctgtgtggcaaatggaaatcatttttagttgattaatactaaaataagtgtttataaagatatgtgattaatactcatttgca

SEQ ID NO: 53973 - DNA, 201 bp, Homo sapiens
aaactaaccaacagtgagcatcttcaactaaaactacccctggatgtaataagtgtaagtattaaaattaaacattatatgtggtcatgaagagaaaattrtttcagggtctgtccaaactacacttcatagaaatttcataattatttttcattttagcatgtgaatgattgataaattggactaggtactgggttaaaa

SEQ ID NO: 53974 - DNA, 201 bp, Homo sapiens
cacatgtggaactaattactcatgtagaggccatgacaaagaacatttctccagacttttcatgggggcttcactttcaggaagttgctataattactgtycaagtctagagcagcctgcaagctgctgacagattcaacagacaggagaaggagggagagagagaaggagagaaagagagagagagcgggagggaaggag

SEQ ID NO: 53975 - DNA, 201 bp, Homo sapiens
agtttaggggcaggttcaacataacaatgaagtgtgcatatgtcacatagttactgtaagtgtgttttaaaaatctatcagaaacataaattgtccaaaarccttatgaatagaacaattgttttcagcaagattttttttttcccctgaaaaactgttgtggtttttctggctcaaaaaatttttatatcttgccttaat

SEQ ID NO: 53976 - DNA, 201 bp, Homo sapiens
ttttatttagttcattaacatgttttagcttcagtatttgaaattaattttcatctttcttagattctggtcaagcttaaaaaatgtaacacaaggctackcaaaacttttttcacatttaacaattaaacactttatgtatgtattcttaactaaagcaaactatttttcattcagctattttatttttaaaatgaaagt

SEQ ID NO: 53977 - DNA, 201 bp, Homo sapiens
tttgtaaaagaccaaaatatactatctacccccacctctcgcctacagaccacccatgtatttcactctgtgggaaacagtttaggcataaaaatcctaaygaaagaattctccccacttttttggttgaagtcttaagctgttataagatataaaaagtacaacttggtaatgtgaaaaaattcactcatccacaagcat

SEQ ID NO: 53978 - DNA, 201 bp, Homo sapiens
aaccattgggtagggactgataaggcccccatctactggtacctctgattttatctcctttctcccccactgttcctatgttacagccacagacttcctgwtggatcccatctccagggtttttatacttactgttccctctacctggaatattcttcagcaaaatcttctgcacagctcatcatctcagtctctgctcaa

SEQ ID NO: 53979 - DNA, 201 bp, Homo sapiens
atcaatccaatcatgtcacaacctgttggaacactccaatcattttcagttatccttgtaataaaatccaaaccattgggtagggactgataaggcccccwtctactggtacctctgattttatctcctttctcccccactgttcctatgttacagccacagacttcctgttggatcccatctccagggtttttatactta

SEQ ID NO: 53980 - DNA, 201 bp, Homo sapiens
caattaatcaagctcttgtttgaggcgactctagctttgatcagaatcctatggagggaaagtgagagaactacatattcagaatattcaagagtatatawaattgaaaacagccacaacagggaaagaaaagtagatgccagtgggctgatatcttataacctttggtcaagcggtacttggcaaatttcaacagattta

SEQ ID NO: 53981 - DNA, 201 bp, Homo sapiens
ccagctactacccagccaccatcctctcttgcctggaccatggtcagagtttccaatctggtctcccttcttccatgctagccatccccgctcccttcacrcatccaccccataccacttattatgcacaatccagcagccagggcaatctttctaaaccatcaatccaatcatgtcacaacctgttggaacactccaatc

SEQ ID NO: 53982 - DNA, 201 bp, Homo sapiens
tatggaattattctactggaccctgcaaggctcaggagagtgcttgacagctcccagaatgagacaatgacctagccagaacattaaggagactacacccrtccttcagactccaaagggaaagctaggacggcagcagagtcatcctaaggtgaggcactccaggataacattttcaatatttttccttaaaacataaag

SEQ ID NO: 53983 - DNA, 201 bp, Homo sapiens
tttcttagtctggttggtcaaattaaatttggaagctacctagaaattttctcacattttgatcttcagaagggcaattaatcaagctcttgtttgaggcractctagctttgatcagaatcctatggagggaaagtgagagaactacatattcagaatattcaagagtatatataattgaaaacagccacaacagggaaa

SEQ ID NO: 53984 - DNA, 201 bp, Homo sapiens
ttataaagctctgctgaatgaaggcaggattgtagtttatgcgctggtacacacgcccacatttatatacattatagccatatctatatccaggtaaattrgaaaaatgtttaattttattttcatattactttataaggagatatacaaatattttagggatcatggaatctattccagaggaaactaaccaacagtgag

SEQ ID NO: 53985 - DNA, 201 bp, Homo sapiens
agaaaactaaaaaaagtaacttagaggagctcattttttcaagaaatatattttttctaattgatacaattactgaagaggaaaaatagctaacaaggtaytttggtaatgtttttctcaaattttctgggttttttttttttttttactctagaaatgattacatttcaaaatttgctttcatttaatgtatatttaatt

SEQ ID NO: 53986 - DNA, 201 bp, Homo sapiens
cctctctattgtttgaacttgtgcactaatcttgtaacaaaaaaaacttaaggctataaaatattagctgaagtacgcatatctggatatcacaaaataaytgtaaacactagtaaccctgcccctttagaggtacacagaaagaagcctcagtcctggtttcaatttgagaatttccaaagtcataaaaatgtgccaaga

SEQ ID NO: 53987 - DNA, 201 bp, Homo sapiens
agaaaacattaagtattctcatatattcatgattattagttaaaatataaacagcaaggagaaatttagctactttcacttagatgatatagtaaagttawcctttcattttctattgtgacttggagagttccatattaattatttttagtagaacaaatgagatgttaaaaatctatatagtttcttttacataagaaa

SEQ ID NO: 53988 - DNA, 201 bp, Homo sapiens
cagttttttgcaaagaggaaaaacatctggttcaattacgctgaactctgactacatgtgggccagtaataatatgaattggacttaagaataaaccttgwgtttaatctctttttttccttaaaattttaatgtgagttttctgttacgcaaattatccatgttagcacatttggaacaaatgtataaatgtactttctg

SEQ ID NO: 53989 - DNA, 201 bp, Homo sapiens
gaaagcgcagcagataattaattggcattttaacaacaggaaatataagcactataagaattcggtaggggaacaagttgtttctgtaggttgacaatatycttctgagcacagaaaaaaactgagtttttccatttgtggactctgatgaaataatgtttaagctctctgagctttaattttatcatcaataaaatgggg

SEQ ID NO: 53990 - DNA, 201 bp, Homo sapiens
aaaaaaaaaaaaatacaaatatattgttcctgccttcaattagcttatattttatctaggaaaaaaaagtttaaatacataaaataacagtacaggtaacrtcttagtacaaaactgtgaaagcgcagcagataattaattggcattttaacaacaggaaatataagcactataagaattcggtaggggaacaagttgttt

SEQ ID NO: 53991 - DNA, 201 bp, Homo sapiens
gtaatataaacaacaggaataatagtacctaacaataaaagaagaacctgccaagtcttgcctaccagacaatgcagatgggatttgcccagagaagagcrccgacccacaacttattgagtcagcaactgagtaaatcagggaataaaaacctctatctttagatacccctgtaaatatctgttttacattttttttaaa

SEQ ID NO: 53992 - DNA, 201 bp, Homo sapiens
ggaaataaaatactggtgatgccaaaagacatcaggagtcaatattctaaaattgtcagtgacctgaggacaccatgattctcttgtccaagggaaccagycctcattttaaagtctgattgtaacatggaattcaacgggagctcatagcacatagcattcagatgatgcttgtcagcttttgagggtgtaagcaggcag

SEQ ID NO: 53993 - DNA, 201 bp, Homo sapiens
ttccccaaagtaaagaatacttgctggtttttaaatgctatatggatagtgcttttctgaagatttccttctgtaatataaacaacaggaataatagtacstaacaataaaagaagaacctgccaagtcttgcctaccagacaatgcagatgggatttgcccagagaagagcaccgacccacaacttattgagtcagcaac

SEQ ID NO: 53994 - DNA, 201 bp, Homo sapiens
agtaaacagtcttcaataattgtagctgacccatacttaattttgctggaaattgttttgcttctttctagagaagcttctattcatcaatgtaaggaagaatgcagaacctccacagaaaggaatttaacctctaagaatcactactctagaaaatgataaaaataaaaccactgaacttgttaatagtagaagattact

SEQ ID NO: 53995 - DNA, 201 bp, Homo sapiens
gtaaaaatcatatctcattgctttaattcctcttagcactagtgaagaagctaagcaaatgttaatgtgtttaattagataactgcatttcttttctttcttttttttttttttttttgtgagatggagtttcactcttcccgcccaagctggagtgcaatggcctgatctcggctcactgcaacctctacctcccaggtt

SEQ ID NO: 53996 - DNA, 201 bp, Homo sapiens
ggggagatttttgtatgtgtcaaaacatatggaaagcagaagaaaaggggcttattcaaagaaatttaaaaattaaaagatttttggagacccagattccsccaccctccataatcctacagcagcatcttcgcaagaaatgtttcctgttatatgcatgtgctgtatctatgttcatttcatacagatttatgagattat

SEQ ID NO: 53997 - DNA, 201 bp, Homo sapiens
tctgggatttccgtgcctacctcaaatatttcatttttttttcttgaatatcatggtgtgtatgagaggaaacttacatgagtttatacattttaaaatayagattttaccaaaataattcttaaccaaatgttaccaaagccatgacttaagggcgttatatacactcagtataccttagaacactgtatatatcacaca

SEQ ID NO: 53998 - DNA, 201 bp, Homo sapiens
attttatactccttgtcttctgagcagacaggcttgctttgaatttccacaggtaaatagaaagcatttctcctcttgattcgcaggaaacatctgtcttytttttaaaaaaaaaaaagtatcatcgtctctttgtattatctttatataggtgattttttagccatgggattgtaatccccttgaagactggaccatgtc

SEQ ID NO: 53999 - DNA, 201 bp, Homo sapiens
ttcagagtaattcagttatgctgctccccacctgtgcctccagaaatcaacaaaagcagtaatcccagattttatttttcttaattggcctacctgcacakgttctctgacagttttaatgtcttactagcagcattttgttcagatgtcagatttatgggggctacaggtcgtacatattcctcataggaacaagtattc

SEQ ID NO: 54000 - DNA, 201 bp, Homo sapiens
ggttgtgtcattactcctcctgttcttactgcccacttcttccagtgcctacaccccctttccgggggcccagagtcttttgggccacaggggaattttgmtagaagatggaatacacaaaggcaacctgcttaataatttgatatctgtaggcttttgcattttatttgcattcttaaagaaaaagactcgtagactggg

SEQ ID NO: 54001 - DNA, 201 bp, Homo sapiens
atcctttctttttacaaagactggccagtttttacttatcttagaaagcaactgaatatggactccagtatgaaacataaacactttttgctttgtgccaratttggaaaatttgcagcctctagttcttcaaatattttttctgccccattctctctttcatgttgggatcttaattaaatatatgttatgactgtggat

SEQ ID NO: 54002 - DNA, 201 bp, Homo sapiens
aaaaagggttaatgatagggagaaggctgcgagagccatcctctagtgagaaataccgaaggtaggctgcggcattgccaggggtgcagaacagtgtggcrcgctgtcgggagacacagtgctaagggggagaaggggggagccccaggtgcacgcctggctgggtgagtgcggcgggcaggagccctcgcttctgggcgg

SEQ ID NO: 54003 - DNA, 201 bp, Homo sapiens
ctcttcttgcctctctgcatttctcagtcagtattacaagagcagcttgctaactggaagagtggccactgaaaaaaatggagacaagagtttaacttggkgctggtgttcctggagccaaagtcatcatccgcagattggtaaccgcggatacaaggcctcttagaggccactagtggccactgggtgaactgcatgaag

SEQ ID NO: 54004 - DNA, 201 bp, Homo sapiens
aggcctcttagaggccactagtggccactgggtgaactgcatgaagatggcattttaaaaatgagtgttctttccaaggtttagtcgcttagcaaatttcrtcccttagtgacttggagaaaacttgatatatagtgccagaaaacctgcttttagaacaattaaatataaatctgaaatgcaaaaggtaaccaggagata

SEQ ID NO: 54005 - DNA, 201 bp, Homo sapiens
tctcctgggttcaagcgattctcctgcctcagcctcccaagtagctgggactattggcgcatgccaccatgcctggctaatttcttttatattttagtagrgacggggtttcactgtgttgtcaagggctagtctcaaactcctgggctcaggcaatccacccacctcagcctcccaaagtgctagagttacaggcatgag

SEQ ID NO: 54006 - DNA, 201 bp, Homo sapiens
tgaaatctgtagcttgttattaataataaattataatgccactagagctatgagtcattcaattcacaagtgattgactgttcgttcattcattctacagycactggacattcatattcctatgccagtgcctctaatggatatcccagaatgtcacttgggttgtggacacatatgtctgccaagtaaataatgactgat

SEQ ID NO: 54007 - DNA, 201 bp, Homo sapiens
tagcctggagtatctctacagcttccaaacatatctcctgttctccattttctccttacacttttttttttttttttttttgaaacagagtcttggtcttrtcgcccaggctggagtgcaatggcacaatctcggctcactgcaacctccacctcccaggttcaagcgattctcctgcctcagcctcccgagtagctggga

SEQ ID NO: 54008 - DNA, 201 bp, Homo sapiens
ggagtgcaatggcacaatctcggctcactgcaacctccacctcccaggttcaagcgattctcctgcctcagcctcccgagtagctgggattacaggcgccmaccaccacaccaggctaatttttgtatttttagtagagacagggtttcaccatgttggccaggctggtctcgaactcctgatctggtgatctgcccacct

SEQ ID NO: 54009 - DNA, 201 bp, Homo sapiens
tggcacaatctcggctcactgcaacctccacctcccaggttcaagcgattctcctgcctcagcctcccgagtagctgggattacaggcgcccaccaccacmccaggctaatttttgtatttttagtagagacagggtttcaccatgttggccaggctggtctcgaactcctgatctggtgatctgcccacctcggcctccc

SEQ ID NO: 54010 - DNA, 201 bp, Homo sapiens
tgccattttatactccttgtcttctgagcagacaggcttgctttgaatttccacaggtaaatagaaagcatttctcctcttgattcgcaggaaacatctgycttctttttaaaaaaaaaaaagtatcatcgtctctttgtattatctttatataggtgattttttagccatgggattgtaatccccttgaagactggacca

SEQ ID NO: 54011 - DNA, 201 bp, Homo sapiens
ttttctgacatgcttcccagaacttggggacaaaggaacatctggcaccacatataaaatttatcattacataaaccaaagatgctgagggcatcctcatraaagcagtacactgcaaagaaattgagtttcaacggtgattgatcactatttgatttgtgctgttaattcttccaagaaatttcataaacaaataaggca

SEQ ID NO: 54012 - DNA, 201 bp, Homo sapiens
attgatcactatttgatttgtgctgttaattcttccaagaaatttcataaacaaataaggcaaaatcacatttatataacattttatcatgtacagatccmttttacattcatggtttcatctgtcttctataagaattctgtgagagagctagccatacccatattttgtttttagatgaaaaaaactaggcttagaaag

SEQ ID NO: 54013 - DNA, 201 bp, Homo sapiens
aaagatttaccttaaagactgagttgctggcctgaaacagaataccagcgaggtttcccactggaatctcttcatcccagaaaattgtttcagggacatgracccaaaaaatcccactaaactgtatgcagctatttttggaataattaagtataagcccttctaaatgtagagttgattagtaaaataagtgttatccca

SEQ ID NO: 54014 - DNA, 201 bp, Homo sapiens
ttattaatacatcctggaacctataatgttgaaggattgctcaggtgctcagaggaagctggaacaagagaaatgagccccatacctccaggggctaaaayccctctggtctattcctcttctagcctggagtatctctacagcttccaaacatatctcctgttctccattttctccttacactttttttttttttttttt

SEQ ID NO: 54015 - DNA, 201 bp, Homo sapiens
ctaatttgattattgacaagtataaaagattatttcatagattgttcttaatataggctatgctggttgttcttaacataggctatgctggtccaactccycttatgacaaagctgacaaaaattcagaaaatgaaacacattttcctataacattacttttttccaatgtgtaccactgtaactgaattaacattacttg

SEQ ID NO: 54016 - DNA, 201 bp, Homo sapiens
ggcgcgatctcggctcactgcaacctctgcctcctgggttcaagcaatcctccccacctcatcctcctgagtagctgggattgcaggcactcaccaccatrccccgctaatttttgtatttttaaaaaatttaatagagacggggtttcaccatgttggccaggctggtcttgaactcctgacctcaggtgatccgccggc

SEQ ID NO: 54017 - DNA, 201 bp, Homo sapiens
caagcaatcctccccacctcatcctcctgagtagctgggattgcaggcactcaccaccataccccgctaatttttgtatttttaaaaaatttaatagagayggggtttcaccatgttggccaggctggtcttgaactcctgacctcaggtgatccgccggcttggctttccaaagtgctaagattataggcgtgagccatc

SEQ ID NO: 54018 - DNA, 201 bp, Homo sapiens
ccattataattaaggggaagacaagatgggtcagtataggtgacttttagaacctgaaatgcctcactgggctcaaggattataatctgggatggttatcktcgagcttggcgtgaagtgtggtggccacgagaatgatccatattagaaacctaaatactagacagacaaagaaaggaagtgcacatccagggttgagac

SEQ ID NO: 54019 - DNA, 201 bp, Homo sapiens
agccaccaagccctagaatgcggttgaagcccattcattttacagggtattcctcatggttatatggctgagacatcagaacaaaggtttctggtcacacwgtgaatcttgaactgtgctagggatgcaacttccacaggtgcataggctctgaggtccttaaggatgggatggtgtcttttatttctgaatgccccctgc

SEQ ID NO: 54020 - DNA, 201 bp, Homo sapiens
acattaaagatgcctaaaatcatgcaaagatgtcaaacgctaccactgaatggctggtcccacctctgggatttccgtgcctacctcaaatatttcatttytttttcttgaatatcatggtgtgtatgagaggaaacttacatgagtttatacattttaaaatacagattttaccaaaataattcttaaccaaatgttacc

SEQ ID NO: 54021 - DNA, 201 bp, Homo sapiens
aatccagagaggtttactctgcacaaagaggaggtttatcattaattggttgatttaattctgacaaggagtggtgggatggaggagattcttagaaaggyataagaccccattagcctgaaaaactactagaacccagtttttaaatagggccaggcttgctttccagttttaattcaatacaatagaactgttaaatga

SEQ ID NO: 54022 - DNA, 201 bp, Homo sapiens
gactttgtttctgggcccagtgaaggttcccccttgatcccctggattacccagtcatgactcctggagacttggctattttcaaaaaccaggcacacccmcaagaggtgaagagtccccattatagaggccaccagagtagagagatggttccagagacatgtggagcactaacaacatgctggagaaaagacaaccacg

SEQ ID NO: 54023 - DNA, 201 bp, Homo sapiens
ccaggtgcacgcctggctgggtgagtgcggcgggcaggagccctcgcttctgggcgggtctaaggaggagaagtggctcgagttcagctccaaattgggayggaggcaggcgatgcgcaggagtggggaggcgcgcaggagtggggagccaagccggcggggttccagtctagcaggctgttctcacttggccccactccc

SEQ ID NO: 54024 - DNA, 201 bp, Homo sapiens
tatagtctgatagggttagggtggagcccaagaagagccataagtaaatccacttaggggtgaggaggtaggaactgctttggaaattgagccacatggargaggataaggaggtggagaggttgggcatgcaattttcaatagggctatcaataggcttaagaagtcagggttgccaacatttcccattccccaagcctg

SEQ ID NO: 54025 - DNA, 201 bp, Homo sapiens
tgtccctgccatggcccaggggaatgatgtctgtatcaccaaaccagtgctggcacctggaccttgtcaccactgacagggctgagaggaggtcagctgcyggctgctgtacccggaacaggtttctagggatcaggcagaggcaagaggctggggaagcagcttgccttgccagctcaccaggctgctctggagagaaat

SEQ ID NO: 54026 - DNA, 201 bp, Homo sapiens
agactccctgctcaatgccactcggggacatgagtctgaatgtccctgccatggcccaggggaatgatgtctgtatcaccaaaccagtgctggcacctggrccttgtcaccactgacagggctgagaggaggtcagctgccggctgctgtacccggaacaggtttctagggatcaggcagaggcaagaggctggggaagca

SEQ ID NO: 54027 - DNA, 201 bp, Homo sapiens
ttaccagcaccaatggaaggaatatactgatattacatccttacagaatctcacagaacagcaatagcattttctcagccatctggtagaactactatacsctgcatgaaacattttcatgagagccctactacttgggcttctagcttccatttgaacagggaactcattttttcatagggcaaacagtccatttttaaa

SEQ ID NO: 54028 - DNA, 201 bp, Homo sapiens
gtaaataatacatctgggagctagggctttttcacctttgaattcagacatgttgggtgtgttcgggtatgtgcatttattttttctgggcagaaaacaartatctttgtgatggttacataaacgatgaaaaattaagttattgaaataatgattctgttatgtatattgaaattagagattagctgctcctcgatatcc

SEQ ID NO: 54029 - DNA, 201 bp, Homo sapiens
ggttagagtcagtccatcatggcatagtgctagttttatgggatattgacaggtattggaagaattagagctccatgtttaaaccagtgtggaaaatgctrgcctaaccaaagctgatcaggattctttactgaagcattcatgtgagactttaatatgctgatgtataccacagatatctcagaggggcaatggtttcca

SEQ ID NO: 54030 - DNA, 201 bp, Homo sapiens
gaggggcaatggtttccaaatgtaaatgactatggaaacttttttctttggagatctgcatttttcagaatatgtttttggaaatgcttcactacttactwattgtgcagcctcagaaaagttatttaatctatctgagcctcagttttcttatctttaatatgggaatgaagtacctatcttatagagtggctgacacca

SEQ ID NO: 54031 - DNA, 201 bp, Homo sapiens
tggaaacttttttctttggagatctgcatttttcagaatatgtttttggaaatgcttcactacttacttattgtgcagcctcagaaaagttatttaatctmtctgagcctcagttttcttatctttaatatgggaatgaagtacctatcttatagagtggctgacaccaagtacattcttaataaatgtttattattattg

SEQ ID NO: 54032 - DNA, 201 bp, Homo sapiens
aggtacctgagacttcttcatgcatctgagtgtctggcttttgatgcagctcctggttaggaaccagccctctccatggtcattagcttcctttttttttwaaaaaaaaaaaaaaaactaccatctagtaggcagcttcttcggcactattgttaatctgagaatttgctagtacttaactcactcttcacacgccataaa

SEQ ID NO: 54033 - DNA, 201 bp, Homo sapiens
actgtgtgatatgatgtgatattgtgttttatggaattggacatggcctatgtctctactatattttcaccttgtatgcaacctcctgggataccattacwtatatatatatatatgtgtatacacacacacacatatatatatacacaaatacatatatatacacatatatgtgtgtgtgtgtatatctgctatatacat

SEQ ID NO: 54034 - DNA, 201 bp, Homo sapiens
tgtcttggatactcttaactcactgttgatttatattatgcatctgataaagcaaaacccttaaaacacattcttttttttttttttttttttttttgagrcagagtcctgctctgttgctcaggctggagttcagtggtgcaatttcagctcactgcaacttctgcctcccgggttcaagcaattctcatgtctcagcct

SEQ ID NO: 54035 - DNA, 201 bp, Homo sapiens
gctcactgcaacttctgcctcccgggttcaagcaattctcatgtctcagcctctcaagttgctaagactacaggctcacaccaccatgcctggctaatttktttgtttttgtttttgttttagtagagatggggtttcactatattggtcaggctggtcttgaactcctgacctcaggtaatccccctgcctcagcctccc

SEQ ID NO: 54036 - DNA, 201 bp, Homo sapiens
gaaaccaaacacgagaaggtgaatcaactccacaattagcaacagcagagaggagttggtgtcgttgtagcgggaggactgagggtaggtcaggcactggmaccgtgtggtcctgtctggtgggagctttagatcccataattccaagaaacactgtctgaggtcaagagggagggaagaatgatcctagcttgtcccttt

SEQ ID NO: 54037 - DNA, 201 bp, Homo sapiens
tgctttcttcctttataaaaccagagattggcagggggcttccttttgtgggaaccccagtggagacagaggatgtttacctgcagggaagaggggccagrgcccggctgtgcctggacccagagtggtggggaaggggggtatgctcataccttgcaggttgacgccccggggcaccacgccctgaagctccactgtggg

SEQ ID NO: 54038 - DNA, 201 bp, Homo sapiens
aggaagccctcctcatcctcttccccactccaccacaccgctagacattgatttctgttatttcactgcaatttgcataaatcacagtcacagtctttatyacactgaattgcaatgatcttttatttattttgtcttctacactgagagtttcttgaggccagggactaacttactcaacttcatgtcccaagggacagc

SEQ ID NO: 54039 - DNA, 201 bp, Homo sapiens
ttgggcaagtggagctgcctgtgaccggcgccacagggcccagagcaagccgcttgctggttcaaccaggaaaccgaggtgcagaaggtggacgcagcggkccctggctcatagggtgcaggggcggtggcttacctgcaggcgctcccctccagaggtgccctcgcgtgggcttgctctgtgcgcctcggggacttcctc

SEQ ID NO: 54040 - DNA, 201 bp, Homo sapiens
cgcttgcctgtcaggaacactcatactcatcctctaagtctcggctccaatatccttgcatcaggaagccctcctcatcctcttccccactccaccacacygctagacattgatttctgttatttcactgcaatttgcataaatcacagtcacagtctttattacactgaattgcaatgatcttttatttattttgtcttc

SEQ ID NO: 54041 - DNA, 201 bp, Homo sapiens
tttacttcatctggcctgttatcccggcaggtgcgcccttctctcccacttgcccctctgactcccaatttcccattcccacttctcctccccatccccayccctagatctgccctccccaccgcaaccagttgctgggagtaccaggcaaggggccctgcagtgccaggaagtccccacccgtcccctttggtcagaggg

SEQ ID NO: 54042 - DNA, 201 bp, Homo sapiens
tgatgcctgccatcttttcccaggcttatatcttctctttcatcttttagtccctcctcacttgcaatatactgttccctctactgcaaacacttttccaygcgcttgcctgtcaggaacactcatactcatcctctaagtctcggctccaatatccttgcatcaggaagccctcctcatcctcttccccactccaccaca

SEQ ID NO: 54043 - DNA, 201 bp, Homo sapiens
ttttctaaaatacatgtctggctaaataaaacttgtctgtgagctggtcctattcccaggccaccagttcgtgctcccaataagtttttttcaatattttyattggattacagtagacttcattgttggggtaagacatgatctcaggcttccattataattaaggggaagacaagatgggtcagtataggtgacttttag

SEQ ID NO: 54044 - DNA, 201 bp, Homo sapiens
tctcctccccttcatcactaagtatctgccatctggcttccgcctcatcattctactgaaagtggaggtcacggtctccaaggcctgtgctcaggccaaargacaggattcagttcttatttacctgaccttttggaagcattgaactctgtctttgaaggtatttttcctaggcctccttgacattgaacactctgtggt

SEQ ID NO: 54045 - DNA, 201 bp, Homo sapiens
ccattacatatatatatatatatgtgtatacacacacacacatatatatatacacaaatacatatatatacacatatatgtgtgtgtgtgtatatctgctrtatacatatatatgctatatatatatacacacacacatattatagctaggtatggctttatgtagtactttcttaaacattcaccctcaaacctgaaggg

SEQ ID NO: 54046 - DNA, 201 bp, Homo sapiens
ctaatgtacccaccttcttacagtaaatatctctgtcttaaaaaaaattttaattgtggtaaaatacacataaaatttataatcttaaccatttttcagtwtacaattcagtagtgttaaggctattcatggtattgtatgacccatctccagaatgtttctgtcttgcaaaactgaaactctgtttccattaaacaactc

SEQ ID NO: 54047 - DNA, 201 bp, Homo sapiens
aacacccttaggagtaaaattagattttggtgcatgaatgttattgacaaaaaagactccctgctcaatgccactcggggacatgagtctgaatgtccctsccatggcccaggggaatgatgtctgtatcaccaaaccagtgctggcacctggaccttgtcaccactgacagggctgagaggaggtcagctgccggctgct

SEQ ID NO: 54048 - DNA, 201 bp, Homo sapiens
gctttcaggcattggtctccttctaatgaggggaatcgaccacacagctccagcatgaccatgctcacctatcccagcaaataggtgtttatccccagtgraacccagcacagaacacccttaggagtaaaattagattttggtgcatgaatgttattgacaaaaaagactccctgctcaatgccactcggggacatgagt

SEQ ID NO: 54049 - DNA, 201 bp, Homo sapiens
gtttcctgttatatgcatgtgctgtatctatgttcatttcatacagatttatgagattataagtcacttttaagaataaacgcacacaaccatgtccagayaaatgttgtcttctaaagcgtttacatttgcaatttaattcaaccaatatttattgagggcctatgacatgccaggctgtgatctaggtacatgggatac

SEQ ID NO: 54050 - DNA, 201 bp, Homo sapiens
tgcatcaatctgggctttcaggcattggtctccttctaatgaggggaatcgaccacacagctccagcatgaccatgctcacctatcccagcaaataggtgyttatccccagtgaaacccagcacagaacacccttaggagtaaaattagattttggtgcatgaatgttattgacaaaaaagactccctgctcaatgccact

SEQ ID NO: 54051 - DNA, 201 bp, Homo sapiens
tcgcaagaaatgtttcctgttatatgcatgtgctgtatctatgttcatttcatacagatttatgagattataagtcacttttaagaataaacgcacacaascatgtccagacaaatgttgtcttctaaagcgtttacatttgcaatttaattcaaccaatatttattgagggcctatgacatgccaggctgtgatctaggt

SEQ ID NO: 54052 - DNA, 201 bp, Homo sapiens
cttattgtgcagcctcagaaaagttatttaatctatctgagcctcagttttcttatctttaatatgggaatgaagtacctatcttatagagtggctgacascaagtacattcttaataaatgtttattattattgttgttgttattattattaagagaagtagaagagcatagtaagagcatagactgtggagctaggctg

SEQ ID NO: 54053 - DNA, 201 bp, Homo sapiens
gctgtgatctaggtacatgggatacatcagagaacaaaacagaatgtttgctctgatagattatagtctgatagggttagggtggagcccaagaagagccrtaagtaaatccacttaggggtgaggaggtaggaactgctttggaaattgagccacatggaggaggataaggaggtggagaggttgggcatgcaattttca

SEQ ID NO: 54054 - DNA, 201 bp, Homo sapiens
catggcatagtgctagttttatgggatattgacaggtattggaagaattagagctccatgtttaaaccagtgtggaaaatgctggcctaaccaaagctgawcaggattctttactgaagcattcatgtgagactttaatatgctgatgtataccacagatatctcagaggggcaatggtttccaaatgtaaatgactatgg

SEQ ID NO: 54055 - DNA, 201 bp, Homo sapiens
ctcagaaattgatggcaataataatcataatagcactgagcatttggattggcccttaggaccaatcattaagtagtcaggtatctgagaaggcatggtgygaggctggaatctgagcaatggaagtcacaaggtaaagaatgtccctgggaagctttttagcagtggccttccagccttcccagggaagcatgccatttt

SEQ ID NO: 54056 - DNA, 201 bp, Homo sapiens
ctacctaacacaatttagcctaattccaaacatatcggaaaatggactgttaaagaaaagaaaaaaatctccggaggagcaactgcctccctgtcctcctrctttttgtctaatatgaacaaaatgtaaattattgtctccctaggttgtaaaatattcttcagagaatgattatacctgtcacagatgggatcttgaaat

SEQ ID NO: 54057 - DNA, 201 bp, Homo sapiens
atttggattggcccttaggaccaatcattaagtagtcaggtatctgagaaggcatggtgcgaggctggaatctgagcaatggaagtcacaaggtaaagaakgtccctgggaagctttttagcagtggccttccagccttcccagggaagcatgccattttatactccttgtcttctgagcagacaggcttgctttgaattt

SEQ ID NO: 54058 - DNA, 201 bp, Homo sapiens
taatagagacggggtttcaccatgttggccaggctggtcttgaactcctgacctcaggtgatccgccggcttggctttccaaagtgctaagattataggcrtgagccatcacatccagcctatttaactgtttttaagaagttatttctagaacttttatccaacgctctgttttggaatattttccactttgtcaatttc

SEQ ID NO: 54059 - DNA, 201 bp, Homo sapiens
gctgttggcatgaggaagctggaggtggctcactagaaatgggaatcccatttgattggttagggggtatattttgctttttccagttggtcctaaattgkaaggatggacaaaaattaaggaagctgtaatttattgatcaagtcctggccatttttgacaattgttatagaagttattgcttgacttcctgagttgtta

SEQ ID NO: 54060 - DNA, 201 bp, Homo sapiens
aatgcctcctccctctgtaattctaaaagtagatctcatccctcaaatgcaggaaagagagggagcaggtctggagaaaggacactaagatttccatgagrtaagtgtgattgttttcagtgacacagaaactatcctcagctttccttagctactaatgggccagttcaaaagtcaaaacctggactgtctgatgccaac

SEQ ID NO: 54061 - DNA, 201 bp, Homo sapiens
ctgcagcattacggcaagcagaaagtgcaggatgcagttttatttttacctcttctcagaaccctgttgtatacatgttcccctgaagggcactttctttscattatgctgtgagctaaagatgtttaattctctagacctctctattccaagctgcctttctcctaagtcctctggtcttattaagaccacaatccccgt

SEQ ID NO: 54062 - DNA, 201 bp, Homo sapiens
ctttccattatgctgtgagctaaagatgtttaattctctagacctctctattccaagctgcctttctcctaagtcctctggtcttattaagaccacaatcyccgtgataaaccagcccaagaatgagctggaggagcacaaatgttcctgttgaaaaggagcttagcaatcaactcctctggtcctctttcttagcacagg

SEQ ID NO: 54063 - DNA, 201 bp, Homo sapiens
cccaggttttgcatacacagccacacttggggagaaagaaaaatactttgttgcaggcagttttgccttgatacttggcactactccatttcctgactgcsttacactcccttccctcccaggtacctgagacttcttcatgcatctgagtgtctggcttttgatgcagctcctggttaggaaccagccctctccatggtc

SEQ ID NO: 54064 - DNA, 201 bp, Homo sapiens
tattttctggaattaagtacattactctagttgtggtttttctgtaaaaaaaaaaaaaagagaccattacatcttttaaaataaacagtctattatttcamatcaagatattgtcagtgtcttggatactcttaactcactgttgatttatattatgcatctgataaagcaaaacccttaaaacacattcttttttttttt

SEQ ID NO: 54065 - DNA, 201 bp, Homo sapiens
taacaaatatgttccttgtggacctaatctggcatataatatatgtacaaaaatacaagttaattaatgaattaaagtcagtggaatctcttatgtcagtraaagcaatagggttgctgacaaaaaaagaaagtaaaagtttttagtgaattgtatatgcaccactggtttttatttcacctttatcttaaacagtcagcc

SEQ ID NO: 54066 - DNA, 201 bp, Homo sapiens
aaaataaggaatttctctgaaggaagtgagacataagcagtgagcaaaagaggagtcagttgtccatgtggaaaggggggtggagaggaatgcttcaggcrgagaaagaaggataggtgaagactgaggcaagagagtgcatagttgcttaagaaattgaaagatgatggttggctgaaatgtactagtgggagccacggt

SEQ ID NO: 54067 - DNA, 201 bp, Homo sapiens
aaatacaagttaattaatgaattaaagtcagtggaatctcttatgtcagtgaaagcaatagggttgctgacaaaaaaagaaagtaaaagtttttagtgaaytgtatatgcaccactggtttttatttcacctttatcttaaacagtcagccactcacttaaactttggcttctgaggctgagagccacataaaagggagca

SEQ ID NO: 54068 - DNA, 201 bp, Homo sapiens
tctcttgggagagtctttctcctgcactgcccttcatcctgtaggagctggagaaaactttccactccagatggaagtgtcctgggggagaggatggaagrgaggctgggtgggcagtttgtagtcaggttctagccacagtagtgagcagtgggggaaggcaagcggccctctgtatccattcacatatttttcaaagcc

SEQ ID NO: 54069 - DNA, 201 bp, Homo sapiens
ttggaagaattagagctccatgtttaaaccagtgtggaaaatgctggcctaaccaaagctgatcaggattctttactgaagcattcatgtgagactttaayatgctgatgtataccacagatatctcagaggggcaatggtttccaaatgtaaatgactatggaaacttttttctttggagatctgcatttttcagaatat

SEQ ID NO: 54070 - DNA, 201 bp, Homo sapiens
tctccagtatttttaaaaaaccttcccccaacaccaatctaccctccctgccttccactgttgtttctcctctcctcctcttcatcactaagcttctgccmtttggcttccatctttcttccctatcatcttcctctgccatctttcttccctgcccagtctccctccactgactccccagttgtcttgcaaggagtttgc

SEQ ID NO: 54071 - DNA, 201 bp, Homo sapiens
attatgtatttctgctaattagaatccttctcaagtcccccattatctgcaggaggaaagcaagatccccaaggcctggtatggtgtgatgcctgccatcytttcccaggcttatatcttctctttcatcttttagtccctcctcacttgcaatatactgttccctctactgcaaacacttttccatgcgcttgcctgtca

SEQ ID NO: 54072 - DNA, 201 bp, Homo sapiens
acctatcttatagagtggctgacaccaagtacattcttaataaatgtttattattattgttgttgttattattattaagagaagtagaagagcatagtaakagcatagactgtggagctaggctgcctgaacccaaatcccaactctcacgtactgtctttgtgaccttggcaagttacataaatgtcctgtgcctcagtt

SEQ ID NO: 54073 - DNA, 201 bp, Homo sapiens
ataccttctcactcttctgaagctgaagggctcaccccattgcctccccaagaagcagggtaaaaattcctaaacacatcactctgggatcctggcgtctstcagaaatatgtagtaaactttgggagttgtgagtaaacagaaaatacgtgggaggagggattccggatccccttaccttgatcctttaattctgagttt

SEQ ID NO: 54074 - DNA, 201 bp, Homo sapiens
gtgactgtgcacacatctgtgtgagcgactgagtgtgtctgagtatctgtgtgtatgggtatttctgagcatgtatgcctctgtgtgtatgcattgtctaygtgagtgtatgtgtctgtgagtgtgtgcacatctgtgtgagcaagtgtgccgtgcatatgagcgagtatgcaggtggaagggaaggactgaggaagcact

SEQ ID NO: 54075 - DNA, 201 bp, Homo sapiens
tgcaacctctgcctcccaggttcaagctatttcccctgcctcagcatccttagtagctgagattacaggtgcccaccaccatgcccacctttttttttttktgtgtatttttagtaaagacagggtatcactatgttggccaggctggtcttgaactcctgacctcaggcgatccaccagccacagcctcccgaagagctg

SEQ ID NO: 54076 - DNA, 201 bp, Homo sapiens
agctgcatcaatctgggctttcaggcattggtctccttctaatgaggggaatcgaccacacagctccagcatgaccatgctcacctatcccagcaaatagktgtttatccccagtgaaacccagcacagaacacccttaggagtaaaattagattttggtgcatgaatgttattgacaaaaaagactccctgctcaatgcc

SEQ ID NO: 54077 - DNA, 201 bp, Homo sapiens
agagctgcatcaatctgggctttcaggcattggtctccttctaatgaggggaatcgaccacacagctccagcatgaccatgctcacctatcccagcaaatrggtgtttatccccagtgaaacccagcacagaacacccttaggagtaaaattagattttggtgcatgaatgttattgacaaaaaagactccctgctcaatg

SEQ ID NO: 54078 - DNA, 201 bp, Homo sapiens
tccacaacacctgggcaagtgtctggcttgctggataaactgcacttcccctttccctttgctatatggagagctgcatcaatctgggctttcaggcattsgtctccttctaatgaggggaatcgaccacacagctccagcatgaccatgctcacctatcccagcaaataggtgtttatccccagtgaaacccagcacaga

SEQ ID NO: 54079 - DNA, 201 bp, Homo sapiens
gctgagattacaggtgcccaccaccatgcccacctttttttttttttgtgtatttttagtaaagacagggtatcactatgttggccaggctggtcttgaastcctgacctcaggcgatccaccagccacagcctcccgaagagctgggattacaggcatgagccaccgcgcctggctagaatagattatttctaaaagctt

SEQ ID NO: 54080 - DNA, 201 bp, Homo sapiens
atctgagcaatggaagtcacaaggtaaagaatgtccctgggaagctttttagcagtggccttccagccttcccagggaagcatgccattttatactccttrtcttctgagcagacaggcttgctttgaatttccacaggtaaatagaaagcatttctcctcttgattcgcaggaaacatctgtcttctttttaaaaaaaaa

SEQ ID NO: 54081 - DNA, 201 bp, Homo sapiens
agacaggcttgctttgaatttccacaggtaaatagaaagcatttctcctcttgattcgcaggaaacatctgtcttctttttaaaaaaaaaaaagtatcatygtctctttgtattatctttatataggtgattttttagccatgggattgtaatccccttgaagactggaccatgtcttaattatcttgctatagtgcctgg

SEQ ID NO: 54082 - DNA, 201 bp, Homo sapiens
ttttacgtgaaaatttggagcgtagagttgatcattcatttcaaaataaattatctcatttactgtaggattaaccataggtgtcctttaaatgtcatttmccattttattctcaaaatatgctagtttcaggacatatatatagttgaaggtatgatgtgggaatttataacataagacctccagatcagcagttttgtt

SEQ ID NO: 54083 - DNA, 201 bp, Homo sapiens
agaaaataacacttggttttctctgaaaatcattttagtgcatgttcaaaaattagaaaattttccccctaaaattttaatttttttcttttactctttctttctttctttctttctttctttcatctttctatctttcagatgaagtcttgctctgttgcaaaggctggagtgcaacctccacctcccgggttcaagtgg

SEQ ID NO: 54084 - DNA, 201 bp, Homo sapiens
ataaagttatacgtataaaacaaaatttatttcattgcccatgagtcagccacccacaggtcaaccaagtatttggttcttatgacagctgatagtatcarttgttttaaattatatcatctatactggtatactttagacatttaattctaagcatgatgttttctaacatgttactttttctaagtgatcttttgattc

SEQ ID NO: 54085 - DNA, 201 bp, Homo sapiens
tgctcccaactgggagtaaatccacaagtcactgaagtgtggaggactaatccactttatcaccttcatcaaatatttagaaatggtaacattactcattrgaaaaccactaaggggataagaaagaaatgttggccgggcacagtgccttacgcctgtaatcccagcactttgggaggccgaggtgggcagatcacctga

SEQ ID NO: 54086 - DNA, 201 bp, Homo sapiens
gaaaataacacttggttttctctgaaaatcattttagtgcatgttcaaaaattagaaaattttccccctaaaattttaatttttttcttttactctttctttctttctttctttctttctttcatctttctatctttcagatgaagtcttgctctgttgcaaaggctggagtgcaacctccacctcccgggttcaagtggt

SEQ ID NO: 54087 - DNA, 201 bp, Homo sapiens
atatatataaagttatacgtataaaacaaaatttatttcattgcccatgagtcagccacccacaggtcaaccaagtatttggttcttatgacagctgatartatcaattgttttaaattatatcatctatactggtatactttagacatttaattctaagcatgatgttttctaacatgttactttttctaagtgatcttt

SEQ ID NO: 54088 - DNA, 201 bp, Homo sapiens
aaaataacacttggttttctctgaaaatcattttagtgcatgttcaaaaattagaaaattttccccctaaaattttaatttttttcttttactctttctttctttctttctttctttctttcatctttctatctttcagatgaagtcttgctctgttgcaaaggctggagtgcaacctccacctcccgggttcaagtggtt

SEQ ID NO: 54089 - DNA, 201 bp, Homo sapiens
gatataagcaaactatatatttgtttgttttcactatgaaaaaactataaacccatgagtttgggttttaaaaatatattgtttacatatataatatatastttttatatattatttatgtatatattgtttacatattataaacaatatatttatatatgatatgtgtatatatattatatataagcaaactttttatat

SEQ ID NO: 54090 - DNA, 201 bp, Homo sapiens
aaataacacttggttttctctgaaaatcattttagtgcatgttcaaaaattagaaaattttccccctaaaattttaatttttttcttttactctttctttctttctttctttctttctttcatctttctatctttcagatgaagtcttgctctgttgcaaaggctggagtgcaacctccacctcccgggttcaagtggttc

SEQ ID NO: 54091 - DNA, 201 bp, Homo sapiens
gtatgatgtgggaatttataacataagacctccagatcagcagttttgtttcacattggaataaaatactgtctttctagcctgcttatatgttgataacraagggtgagaaaaagggtgctgattaatgcctttgagaatagaaaacctaagtcaaaaaaaaaaagacaaaaccccagctcatgggtttatagtttttcc

SEQ ID NO: 54092 - DNA, 201 bp, Homo sapiens
tatcatctatactggtatactttagacatttaattctaagcatgatgttttctaacatgttactttttctaagtgatcttttgattctctgttgcaatatmacttcaacaagccaatgcctcaggaaaaacataaaatcacagtggtactataagtggggaaaaactaaggcagtgataagtaaaactttcctgtataatc

SEQ ID NO: 54093 - DNA, 201 bp, Homo sapiens
tttcaggacatatatatagttgaaggtatgatgtgggaatttataacataagacctccagatcagcagttttgtttcacattggaataaaatactgtcttyctagcctgcttatatgttgataacaaagggtgagaaaaagggtgctgattaatgcctttgagaatagaaaacctaagtcaaaaaaaaaaagacaaaaccc

SEQ ID NO: 54094 - DNA, 201 bp, Homo sapiens
ggtgtcctttaaatgtcatttcccattttattctcaaaatatgctagtttcaggacatatatatagttgaaggtatgatgtgggaatttataacataagamctccagatcagcagttttgtttcacattggaataaaatactgtctttctagcctgcttatatgttgataacaaagggtgagaaaaagggtgctgattaat

SEQ ID NO: 54095 - DNA, 201 bp, Homo sapiens
tattctcaaaatatgctagtttcaggacatatatatagttgaaggtatgatgtgggaatttataacataagacctccagatcagcagttttgtttcacatyggaataaaatactgtctttctagcctgcttatatgttgataacaaagggtgagaaaaagggtgctgattaatgcctttgagaatagaaaacctaagtcaa

SEQ ID NO: 54096 - DNA, 201 bp, Homo sapiens
ctaaccaaagctgatcaggattctttactgaagcattcatgtgagactttaatatgctgatgtataccacagatatctcagaggggcaatggtttccaaaygtaaatgactatggaaacttttttctttggagatctgcatttttcagaatatgtttttggaaatgcttcactacttacttattgtgcagcctcagaaaag

SEQ ID NO: 54097 - DNA, 201 bp, Homo sapiens
ccattgtccattttgcctaggaaatgtcccttgccatggagtgtgttccagcaagcattgatgaatctagcatattgatttttgctttgtttactgggttmacaaggcagtttagatggaaaaagtcttatcatcatccagactccgtttgccacaaacaggaaatgaatttgcttcccctgtccaagcctagttcctggc

SEQ ID NO: 54098 - DNA, 201 bp, Homo sapiens
ttcttcttgttactgaagttggaaaggtccctcctccctctgcatctccaaaccaggcttctgcgttgccttgttctccggggctttgctgtgactcttaygtactcttcctcttgcagcttcaagctcctgcttgctaatagtgggtcttctcagcattcatgcaatttcaggtctcttcagtatttttttaaaaacctc

SEQ ID NO: 54099 - DNA, 201 bp, Homo sapiens
ttaagggcgttatatacactcagtataccttagaacactgtatatatcacacacagtgatgggcaggactcactgctacagaactattagaaatgaaaaasccgccatttccccccttttcctcttcttgcctctctgcatttctcagtcagtattacaagagcagcttgctaactggaagagtggccactgaaaaaaatg

SEQ ID NO: 54100 - DNA, 201 bp, Homo sapiens
gcagcattttgttcagatgtcagatttatgggggctacaggtcgtacatattcctcataggaacaagtattccctggagtgctttcctgaccttgctgggrtatgataagttgcacattcccagtcaatgaacacttattggtcacgtgctgtgggtcagacttgatcacagacactgctcactagatgctcacgacaatc

SEQ ID NO: 54101 - DNA, 201 bp, Homo sapiens
cctgcagggaagaggggccagggcccggctgtgcctggacccagagtggtggggaaggggggtatgctcataccttgcaggttgacgccccggggcaccamgccctgaagctccactgtgggcaggtcatcttccgctgcattagagttattgggtggaactgctcttctgcctccaaaggcggtcctggaagtttctgac

SEQ ID NO: 54102 - DNA, 201 bp, Homo sapiens
accagcccaagaatgagctggaggagcacaaatgttcctgttgaaaaggagcttagcaatcaactcctctggtcctctttcttagcacaggggctttaaarttttttttttaaaaatagctaaacaccaaagtccttagaaatgggtttcatcagttctccgtttaccagcaccaatggaaggaatatactgatattacat

SEQ ID NO: 54103 - DNA, 201 bp, Homo sapiens
caccgcgcccagccaatgccttccatttttaagctatataagaaagatgtctggggagtgggtcagagactgattttatttgatatataccaagtgaaggsaccagcttccacatggttgccagtgaagggaccagcttccacatgttgccagttctttctggaagcccacatccaggtaggcttcctgggcagacccacg

SEQ ID NO: 54104 - DNA, 201 bp, Homo sapiens
cctcatacgggtcagggactctgttatgtgctgcaagggatttgcagggagcaagagagaggtcctttcccgcaaaagacttacggtcagcccctaagctkctcggtgaagggaagagcaacattgaacatccgtcttggacaccttgccccttggttcttctatctcacgagtgcctcgcagtggctctgcctgtggacc

SEQ ID NO: 54105 - DNA, 201 bp, Homo sapiens
gaaccgcttgaacccgggaggtggagcttgcagtgagccgagatcgcgccactgcactccagcctggcgacagagccggactccgtctcaaaacaaaaacmaaaaaagtctgtcttaaaatgatttaaacaaagaaagacatttcataaaaaaaaaataaaacttggctaagaaggggaagattaaaagctacacagagag

SEQ ID NO: 54106 - DNA, 201 bp, Homo sapiens
agccctgcacatgtttgccagctgtagttcagatggtttctatttcactcagcattaattttttatgaaatctgtggcccaggggcccataagcggctttyagttcttcattctatactgtctggtctaattgccaaggcatggtaagactcagattttaaggcgtcgttaatgtatttaccagccttccggtctacaggc

SEQ ID NO: 54107 - DNA, 201 bp, Homo sapiens
gcactttgggaggccgaggtgggcagatcacctgaggtcaggaggtcgagaccagcctgggcaacatggcaaaaccctgtctctactaaaagtacaaaaawtagccaggagtggtggcacatgcctgtaaatcccagtgactcaggaggctgaggcaggagaatcgcttgaacctgagaggcagaggttgcagtaagcgga

SEQ ID NO: 54108 - DNA, 201 bp, Homo sapiens
tcctgcctcagcctcccaagtagctgggactattggcgcatgccaccatgcctggctaatttcttttatattttagtagagacggggtttcactgtgttgwcaagggctagtctcaaactcctgggctcaggcaatccacccacctcagcctcccaaagtgctagagttacaggcatgagccgccgcgtccggcccatttc

SEQ ID NO: 54109 - DNA, 201 bp, Homo sapiens
aactctaccacctgactgaagatgcccttctgttctgtgaacttcttttcccaaacttggatggtactggatacctccctgatttcactatttgatatcawatcatctagtgtgacagtaacacaatgacaccagtccacaacacctgggcaagtgtctggcttgctggataaactgcacttcccctttccctttgctata

SEQ ID NO: 54110 - DNA, 201 bp, Homo sapiens
tcatcatccgcagattggtaaccgcggatacaaggcctcttagaggccactagtggccactgggtgaactgcatgaagatggcattttaaaaatgagtgtkctttccaaggtttagtcgcttagcaaatttcgtcccttagtgacttggagaaaacttgatatatagtgccagaaaacctgcttttagaacaattaaatat

SEQ ID NO: 54111 - DNA, 201 bp, Homo sapiens
tatgaaatctgtggcccaggggcccataagcggctttcagttcttcattctatactgtctggtctaattgccaaggcatggtaagactcagattttaaggygtcgttaatgtatttaccagccttccggtctacaggcaggctcacctctttgtgtgggattttaatcatgttttgtttttagaaaggaaatgaaggtatt

SEQ ID NO: 54112 - DNA, 201 bp, Homo sapiens
ggactgaatgacagggtcaagaccaggtgaaggtagagctacccccagagaaacatgtggcctttgttaaatcactagggacaggcactaactttgaggayatttgggccaaatactgtgcgaggtgcccaaattcctcatataattttcttaaaaacttgtttcccaagtgtggaaagattcactaactctcccagatct

SEQ ID NO: 54113 - DNA, 201 bp, Homo sapiens
cttagagctgggcccatggtgctcctggaagatatgattggatttctcctcaccctctgagcagtgtaggcacaggtcttctggtgcaggggatggggacrttagaatgtggcagctagctggtacctattggagaccacccctgtaggtggggtgactctaccactctggtctgtcaacagaatagtttttatgggaccc

SEQ ID NO: 54114 - DNA, 201 bp, Homo sapiens
gctgtatctatgttcatttcatacagatttatgagattataagtcacttttaagaataaacgcacacaaccatgtccagacaaatgttgtcttctaaagcrtttacatttgcaatttaattcaaccaatatttattgagggcctatgacatgccaggctgtgatctaggtacatgggatacatcagagaacaaaacagaat

SEQ ID NO: 54115 - DNA, 201 bp, Homo sapiens
gagctgacgggggaagggagggagaagagcgaaaaagggttaatgatagggagaaggctgcgagagccatcctctagtgagaaataccgaaggtaggctgyggcattgccaggggtgcagaacagtgtggcgcgctgtcgggagacacagtgctaagggggagaaggggggagccccaggtgcacgcctggctgggtgagt

SEQ ID NO: 54116 - DNA, 201 bp, Homo sapiens
actttcctggaaaacctggtgcatctcaggagttccctacctcaatgaataccatcactttgcacgcaggtggtacaccagacacatgggcatcattcttsaggcttccttgtttctctccctcaatcatcaaatccgatccttgagcaaatattttctatcctacctcttaaacagcccttgaatctacccgtgtatgta

SEQ ID NO: 54117 - DNA, 201 bp, Homo sapiens
taaaacttggctaagaaggggaagattaaaagctacacagagaggttgagagtttaaagaaataatgttccagactgtagtcaaatggaaaagacatgagsaagcttaatgggttgtccaaagtattggggatagaggtgaggtccccaataccactgattcaacaaaatttatttcattgcccatgagtcagccacacac

SEQ ID NO: 54118 - DNA, 201 bp, Homo sapiens
actttgcacgcaggtggtacaccagacacatgggcatcattcttgaggcttccttgtttctctccctcaatcatcaaatccgatccttgagcaaatatttkctatcctacctcttaaacagcccttgaatctacccgtgtatgtacccctttccagtccattctctacagtgcagtcagaatgagcatttcagggctaaaa

SEQ ID NO: 54119 - DNA, 201 bp, Homo sapiens
agatggaaaaagtcttatcatcatccagactccgtttgccacaaacaggaaatgaatttgcttcccctgtccaagcctagttcctggcaaaatggaacagytcattgctaagccgccttttttttttttttttttttaaatacggtagctagaaacttggcagctcgctctttcaaagtgacagctttcaaactgtctacc

SEQ ID NO: 54120 - DNA, 201 bp, Homo sapiens
atacctccaggggctaaaatccctctggtctattcctcttctagcctggagtatctctacagcttccaaacatatctcctgttctccattttctccttacwcttttttttttttttttttttgaaacagagtcttggtcttgtcgcccaggctggagtgcaatggcacaatctcggctcactgcaacctccacctcccagg

SEQ ID NO: 54121 - DNA, 201 bp, Homo sapiens
gttgggattacaggcgtgagccaccgcacccagtcaaacatggctatttctaaccttctttactgtcttcaaatttctgaccctgccactcaatctcccartgttataaagaagaaaaaaaaagatgccattggttagaaattctctcaattttctgctaccaatctatgaacctgcctgcaaccttatctatcttttcct

SEQ ID NO: 54122 - DNA, 201 bp, Homo sapiens
atcctacctcttaaacagcccttgaatctacccgtgtatgtacccctttccagtccattctctacagtgcagtcagaatgagcatttcagggctaaaatcygaaatcaaattatttgcacaaagcccttatatggctacttctctttgctttttggataaattgcaagctgaaactgacaaggcctatacaagctggaccc

SEQ ID NO: 54123 - DNA, 201 bp, Homo sapiens
aacaggaaatgaatttgcttcccctgtccaagcctagttcctggcaaaatggaacagctcattgctaagccgccttttttttttttttttttttaaatackgtagctagaaacttggcagctcgctctttcaaagtgacagctttcaaactgtctacctaacacaatttagcctaattccaaacatatcggaaaatggact

SEQ ID NO: 54124 - DNA, 201 bp, Homo sapiens
atatctttatatattatatactgtttatatataatagatataagcaaactatatatttgtttgttttcactatgaaaaaactataaacccatgagtttggkttttaaaaatatattgtttacatatataatatatagtttttatatattatttatgtatatattgtttacatattataaacaatatatttatatatgatat

SEQ ID NO: 54125 - DNA, 201 bp, Homo sapiens
tttctttctttctttctttctttcatctttctatctttcagatgaagtcttgctctgttgcaaaggctggagtgcaacctccacctcccgggttcaagtgrttcttctgcctcagcctcccaagtagctggaactacaggtgcatgccaccatgcccgcctaatttttgtatttttagtagagatggggctttaccatgtt

SEQ ID NO: 54126 - DNA, 201 bp, Homo sapiens
ctctgcagtctctccagacaaaccatctttctcctacttggcaatacccaaggagcagaccatatttgttcaggcaatgaattttctggcaaactctattygatttacatgcaaaacttcacatctcaaacaaacaaacaaaaaacccagtcatgtctggacgctgctggttttttccagctgaacaagacctggattttg

SEQ ID NO: 54127 - DNA, 201 bp, Homo sapiens
gtgcaattcatgcttgtcaaggggtgagatttataattggctggttgtggttgtatatgtgaggatatgtatatgtgaggatatgtatatgtaagggtctrtttctcttgctctgtcacccaggcaggagtgcagtggcgcgatctcagctcactgcaagctctgcctcccgggttcacgccattctcctgcctcagcctc

SEQ ID NO: 54128 - DNA, 201 bp, Homo sapiens
tgcagagttgctggttgccaggggtctacatgcaaggccagtgccgcgatcattttcatgaatttcagatgtcctttctcttgccaacttcgtgtgttttytgaaaaataataagaaaaaaaaaaaaacccagtcatctggccttacttccttaaaccgaagctattagaggtatccaggatctgactagggcagctaatt

SEQ ID NO: 54129 - DNA, 201 bp, Homo sapiens
atagtttttatatattatttatgtatatattgtttacatattataaacaatatatttatatatgatatgtgtatatatattatatataagcaaactttttwtatatatataaagttacatatatataaagttatacgtataaaacaaaatttatttcattgcccatgagtcagccacccacaggtcaaccaagtatttggt

SEQ ID NO: 54130 - DNA, 201 bp, Homo sapiens
tgcagtggcgcgatctcagctcactgcaagctctgcctcccgggttcacgccattctcctgcctcagcctcctgagtagctgggattacaggtgcccgccwccacgcccggctaatttttgtatttttagtagagacggggtttcaccgtgttagccaggatggtctcaatctcctcgtgatccgctcgcctcagcctccg

SEQ ID NO: 54131 - DNA, 201 bp, Homo sapiens
acttcttcatgcatctgagtgtctggcttttgatgcagctcctggttaggaaccagccctctccatggtcattagcttcctttttttttaaaaaaaaaaamaaaaactaccatctagtaggcagcttcttcggcactattgttaatctgagaatttgctagtacttaactcactcttcacacgccataaaaatctctattc

SEQ ID NO: 54132 - DNA, 201 bp, Homo sapiens
ctcccgggttcacgccattctcctgcctcagcctcctgagtagctgggattacaggtgcccgccaccacgcccggctaatttttgtatttttagtagagayggggtttcaccgtgttagccaggatggtctcaatctcctcgtgatccgctcgcctcagcctccgaaagtgctgggattataggcgtgagccaccgcgccc

SEQ ID NO: 54133 - DNA, 201 bp, Homo sapiens
tctgcccctactttcttggccttaccagctcagcatgagacctccaaggagacgtgaactccctctggctgcacgggcctgggcataccttctcactcttstgaagctgaagggctcaccccattgcctccccaagaagcagggtaaaaattcctaaacacatcactctgggatcctggcgtctctcagaaatatgtagta

SEQ ID NO: 54134 - DNA, 201 bp, Homo sapiens
tttaaaaaaaaaaaaaaaaactaccatctagtaggcagcttcttcggcactattgttaatctgagaatttgctagtacttaactcactcttcacacgccakaaaaatctctattctttgaagtgtctaagtgtgtgatggctgaatgtgttgggaggagctgtgtttcaatatgttttttacttttgttctcaggccagag

SEQ ID NO: 54135 - DNA, 201 bp, Homo sapiens
aactaaggcagtgataagtaaaactttcctgtataatctcttaaaagtgcgtcttgggggccgggcgcggtggctcatgcctgtaattccagtactttggraggcgagaggggcagatcacgagatcaggagatcgagaccatcctggctaacacggtgaaaccctgtctctactaaaaatacaaaaaattagccgggagt

SEQ ID NO: 54136 - DNA, 201 bp, Homo sapiens
cgcggtggctcatgcctgtaattccagtactttgggaggcgagaggggcagatcacgagatcaggagatcgagaccatcctggctaacacggtgaaacccwgtctctactaaaaatacaaaaaattagccgggagtggtggtgggcgcctgtagtcccagctactcgggaggctgaggcaggagaaccgcttgaacccggg

SEQ ID NO: 54137 - DNA, 201 bp, Homo sapiens
gaggctgttggcatgaggaagctggaggtggctcactagaaatgggaatcccatttgattggttagggggtatattttgctttttccagttggtcctaaaytggaaggatggacaaaaattaaggaagctgtaatttattgatcaagtcctggccatttttgacaattgttatagaagttattgcttgacttcctgagttg

SEQ ID NO: 54138 - DNA, 201 bp, Homo sapiens
ctgtaattccagtactttgggaggcgagaggggcagatcacgagatcaggagatcgagaccatcctggctaacacggtgaaaccctgtctctactaaaaawacaaaaaattagccgggagtggtggtgggcgcctgtagtcccagctactcgggaggctgaggcaggagaaccgcttgaacccgggaggtggagcttgcag

SEQ ID NO: 54139 - DNA, 201 bp, Homo sapiens
caaagtcatcatccgcagattggtaaccgcggatacaaggcctcttagaggccactagtggccactgggtgaactgcatgaagatggcattttaaaaatgmgtgttctttccaaggtttagtcgcttagcaaatttcgtcccttagtgacttggagaaaacttgatatatagtgccagaaaacctgcttttagaacaatta

SEQ ID NO: 54140 - DNA, 201 bp, Homo sapiens
aaccatgcagaactgtgagtcaattaaacctcttttctttataaattaactagtgttgggcgtttcttcacagcagcatgagaacagctgaatacaactayagttcactaacgaatcaaactctcccggttgacttcattcccctgtaatgtggttctttgttaatttgaaatttaaactagtaaattgtgacgtatctta

SEQ ID NO: 54141 - DNA, 201 bp, Homo sapiens
ttattctctcatccctcagattgatgatgaggaacttctcctggaggagcagatgttggttcagttgctcctgagtgaagcccaatcctcaggttccatcrctattcacagggtgacagctatcgcttgtatggagataccaaagctgcatgggagacatcaaggaccaggggtcacagttctctccttgacctcatatgg

SEQ ID NO: 54142 - DNA, 201 bp, Homo sapiens
cttctcggtgaagggaagagcaacattgaacatccgtcttggacaccttgccccttggttcttctatctcacgagtgcctcgcagtggctctgcctgtggwcccttactcatgttctctggaccagggttgttaaccatagcaggttagaactgcccatttattctaaatacaacagccaactaccatctttatttcaacc

SEQ ID NO: 54143 - DNA, 201 bp, Homo sapiens
ccaccacaatagggcgtgggatctaagacaggaccatgtctcccacagcctcttttccttcttctttcaggaaagatgaaaacccatgccagggacaggtscagatggcaggagttttctctttgctttggcttccctgggcatagcccactcttgccagggatctacgatcacctgtaatctaccttcccgaggagcagt

SEQ ID NO: 54144 - DNA, 201 bp, Homo sapiens
tcacgagtgcctcgcagtggctctgcctgtggacccttactcatgttctctggaccagggttgttaaccatagcaggttagaactgcccatttattctaartacaacagccaactaccatctttatttcaaccctcacttcccaccacttcttctctagtctcaaaatgcctttcagcataggcaggaaatatgacagaag

SEQ ID NO: 54145 - DNA, 201 bp, Homo sapiens
aaaaaaataacctggtgttgaaagcacaatggatttgaaataacacctaagtcagagtcatagctgtgccaccttcggctgtgcaacttgggaaactcaayttatttgttgtcttgagttcctttcctataaactgcaaaatttgaatagattatctctttttttttttttttttggttggagttttgatcttgttgccca

SEQ ID NO: 54146 - DNA, 201 bp, Homo sapiens
gacagaggatgtttacctgcagggaagaggggccagggcccggctgtgcctggacccagagtggtggggaaggggggtatgctcataccttgcaggttgaygccccggggcaccacgccctgaagctccactgtgggcaggtcatcttccgctgcattagagttattgggtggaactgctcttctgcctccaaaggcggtc

SEQ ID NO: 54147 - DNA, 201 bp, Homo sapiens
aattagatttaagttaagaaaggataatatgcagacaacatagaccttatgcagataggctaacagccattcttcccatcgacccacacaaaaataaaagsctcaaaaataattacgtaaaatcaggatttataacaatgcctcgagttaacaacccgcctacttggttaaagttccctttaatttaaacaggtgacatga

SEQ ID NO: 54148 - DNA, 201 bp, Homo sapiens
ctgttggcatgaggaagctggaggtggctcactagaaatgggaatcccatttgattggttagggggtatattttgctttttccagttggtcctaaattggwaggatggacaaaaattaaggaagctgtaatttattgatcaagtcctggccatttttgacaattgttatagaagttattgcttgacttcctgagttgttat

SEQ ID NO: 54149 - DNA, 201 bp, Homo sapiens
tcccacttgcccctctgactcccaatttcccattcccacttctcctccccatccccacccctagatctgccctccccaccgcaaccagttgctgggagtascaggcaaggggccctgcagtgccaggaagtccccacccgtcccctttggtcagagggtctgggagggtttcctttacaaaggaatgcttttgcctggcag

SEQ ID NO: 54150 - DNA, 201 bp, Homo sapiens
tgagcactcaggagcccttctatgttctatttattctctcatccctcagattgatgatgaggaacttctcctggaggagcagatgttggttcagttgctcytgagtgaagcccaatcctcaggttccatcgctattcacagggtgacagctatcgcttgtatggagataccaaagctgcatgggagacatcaaggaccagg

SEQ ID NO: 54151 - DNA, 201 bp, Homo sapiens
tctttgttgctgggccttggcgatcaaagccctgcacatgtttgccagctgtagttcagatggtttctatttcactcagcattaattttttatgaaatctrtggcccaggggcccataagcggctttcagttcttcattctatactgtctggtctaattgccaaggcatggtaagactcagattttaaggcgtcgttaatg

SEQ ID NO: 54152 - DNA, 201 bp, Homo sapiens
acacaatttagcctaattccaaacatatcggaaaatggactgttaaagaaaagaaaaaaatctccggaggagcaactgcctccctgtcctcctactttttstctaatatgaacaaaatgtaaattattgtctccctaggttgtaaaatattcttcagagaatgattatacctgtcacagatgggatcttgaaataagttaa

SEQ ID NO: 54153 - DNA, 201 bp, Homo sapiens
atgttttgtttttagaaaggaaatgaaggtattcttggactaaatatacttgcttttctttggatttattatcagtatttcacatcagcgagacagcatayacaacactgccaatcccaaacctcagactttatcttccagtttaagtttgattcttaagaagcatatggagtctgtgcagtggaggtaaggcctgtttaa

SEQ ID NO: 54154 - DNA, 201 bp, Homo sapiens
gtaattccagtactttgggaggcgagaggggcagatcacgagatcaggagatcgagaccatcctggctaacacggtgaaaccctgtctctactaaaaatamaaaaaattagccgggagtggtggtgggcgcctgtagtcccagctactcgggaggctgaggcaggagaaccgcttgaacccgggaggtggagcttgcagtg

SEQ ID NO: 54155 - DNA, 201 bp, Homo sapiens
acctgtcacagatgggatcttgaaataagttaaatgtttaggtttatatactaggaattccctagtgaactgaattctccatgcaatttttggtaatattrttattgaactataagcataaatgctatccatgagaaactggtttatttatttaaaaaaaaacaggaaaaataactctttctcacatttcttttgggtacc

SEQ ID NO: 54156 - DNA, 201 bp, Homo sapiens
ccctgtctctactaaaaatacaaaaaattagccgggagtggtggtgggcgcctgtagtcccagctactcgggaggctgaggcaggagaaccgcttgaaccygggaggtggagcttgcagtgagccgagatcgcgccactgcactccagcctggcgacagagccggactccgtctcaaaacaaaaacaaaaaaagtctgtct

SEQ ID NO: 54157 - DNA, 201 bp, Homo sapiens
gggttacaagcatgagccaccgtgcccagccctccctaccactttgtaaagcataattctgattatgtatttctgctaattagaatccttctcaagtcccscattatctgcaggaggaaagcaagatccccaaggcctggtatggtgtgatgcctgccatcttttcccaggcttatatcttctctttcatcttttagtccc

SEQ ID NO: 54158 - DNA, 201 bp, Homo sapiens
aaaaaataaaatcacaataggggtaacctaaaataattggatggtcaaagccagtcttcactgtcacaatgtcaaatacatttagggacaaacaggtaacrttaatgtagtgtgatttaggacacctgagtgtcaggaacacgtactcaaacctgagagtccctgttctgtctgaacacactcagatttttctaaaataca

SEQ ID NO: 54159 - DNA, 201 bp, Homo sapiens
tagaattgttttcccatgaagacaaaaacctacttgtgggaatttgagaaacacagttgatgggactatgtctccaaaagatttgcatatgtctttgtatrgaaacactaaaatctctcacacacagattacaatggaagagatctgcagtcacaggccagatgaaaatgcttggtctgccagcccagtgactgatgtttt

SEQ ID NO: 54160 - DNA, 201 bp, Homo sapiens
gctcagaggattttctatttacttcatctggcctgttatcccggcaggtgcgcccttctctcccacttgcccctctgactcccaatttcccattcccactyctcctccccatccccacccctagatctgccctccccaccgcaaccagttgctgggagtaccaggcaaggggccctgcagtgccaggaagtccccacccgt

SEQ ID NO: 54161 - DNA, 201 bp, Homo sapiens
aagcacaagcttcaaaacagcaatttctttctaataattgtaaagttttgcacaactaaacaataaaagccaaataatccactcacaataaaacctggttsgataagatacagaaggttatgctatgaaacaacagccatcacaaattaatacagttttgctccccaagtactatagttctttttcggaacattggttgcc

SEQ ID NO: 54162 - DNA, 201 bp, Homo sapiens
tatttgctgcacttatagtcatttctcatggaaaaatttgacatataaatccatcatatattagattattccagtaaactaaaatggccataggcactcartgtaaaatattttagcatttaaaacatccatagcaaaggtttttcatttataataatcatagatattattaaagtaaataatacatctgggagctagggc

SEQ ID NO: 54163 - DNA, 201 bp, Homo sapiens
tgtgcaattcatgcttgtcaaggggtgagatttataattggctggttgtggttgtatatgtgaggatatgtatatgtgaggatatgtatatgtaagggtcwatttctcttgctctgtcacccaggcaggagtgcagtggcgcgatctcagctcactgcaagctctgcctcccgggttcacgccattctcctgcctcagcct

SEQ ID NO: 54164 - DNA, 201 bp, Homo sapiens
attggttgcccttttaaaattttattgataaggaaaaaaaaacagctacacaagaccaggatgttgaaaggtaatctatatcctcaaaataaactaaaggktattgtaaataagttaaataagttatatcacataaactgcatttacctttcccctctacaagttatggtacccaccagaggctggaatcccaaagcaatg

SEQ ID NO: 54165 - DNA, 201 bp, Homo sapiens
caggtacctgagacttcttcatgcatctgagtgtctggcttttgatgcagctcctggttaggaaccagccctctccatggtcattagcttcctttttttttaaaaaaaaaaaaaaaaactaccatctagtaggcagcttcttcggcactattgttaatctgagaatttgctagtacttaactcactcttcacacgccataa

SEQ ID NO: 54166 - DNA, 201 bp, Homo sapiens
gtgtctggtctgagaaggagacaggagtgtttggatgcataaggtgtgaatgggtatccataagtatagataaatatatttacagtcattggtgagctgasgggggaagggagggagaagagcgaaaaagggttaatgatagggagaaggctgcgagagccatcctctagtgagaaataccgaaggtaggctgcggcattg

SEQ ID NO: 54167 - DNA, 201 bp, Homo sapiens
ggtacctgagacttcttcatgcatctgagtgtctggcttttgatgcagctcctggttaggaaccagccctctccatggtcattagcttcctttttttttawaaaaaaaaaaaaaaactaccatctagtaggcagcttcttcggcactattgttaatctgagaatttgctagtacttaactcactcttcacacgccataaaa

SEQ ID NO: 54168 - DNA, 201 bp, Homo sapiens
catgtttcccccaatcttttagtgtctgttcttcagactgaataatttctattaatctatttctgtttatctttttcttatgttacctctaatctgctgtkaagcccaccagtgaatttattatttgaaattttattttattgatttatttttgtcctagaatttccattaatttctttttgatcctttattttccctatt

SEQ ID NO: 54169 - DNA, 201 bp, Homo sapiens
gtacctgagacttcttcatgcatctgagtgtctggcttttgatgcagctcctggttaggaaccagccctctccatggtcattagcttcctttttttttaawaaaaaaaaaaaaaactaccatctagtaggcagcttcttcggcactattgttaatctgagaatttgctagtacttaactcactcttcacacgccataaaaa

SEQ ID NO: 54170 - DNA, 201 bp, Homo sapiens
caaatagtgttgatttgcatgtttgcttattttagcagttagctcacttaactaagtttattcccattacaagaagtgaaattcctaaacccttcattttaaaaggcttctttgaagcacatgaaaaatctgatattaatcagccacttcttctgaacttattacctgaaaaaatatcattccaccataaagcaaatcaaa

SEQ ID NO: 54171 - DNA, 201 bp, Homo sapiens
aaatagtgttgatttgcatgtttgcttattttagcagttagctcacttaactaagtttattcccattacaagaagtgaaattcctaaacccttcattttaaaaggcttctttgaagcacatgaaaaatctgatattaatcagccacttcttctgaacttattacctgaaaaaatatcattccaccataaagcaaatcaaac

SEQ ID NO: 54172 - DNA, 201 bp, Homo sapiens
aaaagcattttcttaagtggcttaatttataaagtgttgttattaatacatcctggaacctataatgttgaaggattgctcaggtgctcagaggaagctgsaacaagagaaatgagccccatacctccaggggctaaaatccctctggtctattcctcttctagcctggagtatctctacagcttccaaacatatctcctg

SEQ ID NO: 54173 - DNA, 201 bp, Homo sapiens
ccttgacctcatatggaaggacaattgagtgctctctgcaagagcttccaagtccccaggtagagggaaccctgcaggctccccttggataaatgcagatrcaggcactgggccctctgcgagtgtctcgaaatggaaactctgcagatggggtctttgctgccaaagctaacatcctaaaggctcgtggccccaaacagc

SEQ ID NO: 54174 - DNA, 201 bp, Homo sapiens
atgaagggggactttgtttctgggcccagtgaaggttcccccttgatcccctggattacccagtcatgactcctggagacttggctattttcaaaaaccakgcacacccacaagaggtgaagagtccccattatagaggccaccagagtagagagatggttccagagacatgtggagcactaacaacatgctggagaaaag

SEQ ID NO: 54175 - DNA, 201 bp, Homo sapiens
ccccccttttcctcttcttgcctctctgcatttctcagtcagtattacaagagcagcttgctaactggaagagtggccactgaaaaaaatggagacaagartttaacttggggctggtgttcctggagccaaagtcatcatccgcagattggtaaccgcggatacaaggcctcttagaggccactagtggccactgggtga

SEQ ID NO: 54176 - DNA, 201 bp, Homo sapiens
tttaccaaaataattcttaaccaaatgttaccaaagccatgacttaagggcgttatatacactcagtataccttagaacactgtatatatcacacacagtratgggcaggactcactgctacagaactattagaaatgaaaaacccgccatttccccccttttcctcttcttgcctctctgcatttctcagtcagtattac

SEQ ID NO: 54177 - DNA, 201 bp, Homo sapiens
tgatattaatcagccacttcttctgaacttattacctgaaaaaatatcattccaccataaagcaaatcaaacagagggacctgagtagatgtttacagagmtctttagtttgtagagacttctccttcaaataataataataataataacaataaaattctctcatagctcttctgttttccaaaactaagggagttaatc

SEQ ID NO: 54178 - DNA, 201 bp, Homo sapiens
ccgcttgctggttcaaccaggaaaccgaggtgcagaaggtggacgcagcgggccctggctcatagggtgcaggggcggtggcttacctgcaggcgctcccstccagaggtgccctcgcgtgggcttgctctgtgcgcctcggggacttcctcaaacggactcgggaaagacaagacagttggctcttaaataacttcctaa

SEQ ID NO: 54179 - DNA, 201 bp, Homo sapiens
accggcgccacagggcccagagcaagccgcttgctggttcaaccaggaaaccgaggtgcagaaggtggacgcagcgggccctggctcatagggtgcagggkcggtggcttacctgcaggcgctcccctccagaggtgccctcgcgtgggcttgctctgtgcgcctcggggacttcctcaaacggactcgggaaagacaaga

SEQ ID NO: 54180 - DNA, 201 bp, Homo sapiens
agaaatttcataaacaaataaggcaaaatcacatttatataacattttatcatgtacagatcccttttacattcatggtttcatctgtcttctataagaaytctgtgagagagctagccatacccatattttgtttttagatgaaaaaaactaggcttagaaagatgaagggctctgactaggtcacacagctagtaagag

SEQ ID NO: 54181 - DNA, 201 bp, Homo sapiens
cagattttaccaaaataattcttaaccaaatgttaccaaagccatgacttaagggcgttatatacactcagtataccttagaacactgtatatatcacacrcagtgatgggcaggactcactgctacagaactattagaaatgaaaaacccgccatttccccccttttcctcttcttgcctctctgcatttctcagtcagt

SEQ ID NO: 54182 - DNA, 201 bp, Homo sapiens
actacagttcactaacgaatcaaactctcccggttgacttcattcccctgtaatgtggttctttgttaatttgaaatttaaactagtaaattgtgacgtaycttacagatcgttatggctcaacagtattagtttcctgttattgttgccattgtaaaggctttggttttatttgttttctttttggctttacgtttttct

SEQ ID NO: 54183 - DNA, 201 bp, Homo sapiens
attttaaaatacagattttaccaaaataattcttaaccaaatgttaccaaagccatgacttaagggcgttatatacactcagtataccttagaacactgtrtatatcacacacagtgatgggcaggactcactgctacagaactattagaaatgaaaaacccgccatttccccccttttcctcttcttgcctctctgcatt

SEQ ID NO: 54184 - DNA, 201 bp, Homo sapiens
cagatcgttatggctcaacagtattagtttcctgttattgttgccattgtaaaggctttggttttatttgttttctttttggctttacgtttttctaattrtttgctaatatctaatttagatattctttatttcaccaaatcatgcatttggaaagactactcatattttgcctgttgttttgcaatccaaataacatac

SEQ ID NO: 54185 - DNA, 201 bp, Homo sapiens
aatcccaaagcaatgaaaagacaattagaattatatgccttggttttgtttttattagtcagaatgaaaaaaaaaataacctggtgttgaaagcacaatgratttgaaataacacctaagtcagagtcatagctgtgccaccttcggctgtgcaacttgggaaactcaatttatttgttgtcttgagttcctttcctataa

SEQ ID NO: 54186 - DNA, 201 bp, Homo sapiens
tcatcatccagactccgtttgccacaaacaggaaatgaatttgcttcccctgtccaagcctagttcctggcaaaatggaacagctcattgctaagccgccttttttttttttttttttttaaatacggtagctagaaacttggcagctcgctctttcaaagtgacagctttcaaactgtctacctaacacaatttagccta

SEQ ID NO: 54187 - DNA, 201 bp, Homo sapiens
aatgagccacaaatcttaaggtttattattgcatccttcacttgtgagctatctgcactctagtgaagagaggtagcatataaaaaattttgccaaagaakttcaatatatgggaatcaacatatagacacctaaaaggaggtaaaacatagctcaatagtatcagcccaatttctcacatctttactgtgggacagatgg

SEQ ID NO: 54188 - DNA, 201 bp, Homo sapiens
ctggctagaatagattatttctaaaagcttttcaagatctgacattcgtataatgatgagcagctattctttcctttaggaattcctggtgggctttgctrtcatttcttcataacgcctactggggacactattgctttctcccttagtatctttcttgtgacaaccgcatgcctggaggtaatcaatttcctttggtgg

SEQ ID NO: 54189 - DNA, 201 bp, Homo sapiens
gagatttcaggacaaagtaattttgcaagagaaggatcaacttgagataggactctgaagtttttattattcacagtacttaaaggtctgggataacataytttaagaacccaaagcaagatgctcaaatcaattcttacagttggtctcaaaaatagatacacataactagatgttaggaccaggttttctcctgttgca

SEQ ID NO: 54190 - DNA, 201 bp, Homo sapiens
cgatcttggctcactgcaacttctgtctcctgggttcaagcgattctcctgcctcagcctcccaagtagctgggactattggcgcatgccaccatgcctgrctaatttcttttatattttagtagagacggggtttcactgtgttgtcaagggctagtctcaaactcctgggctcaggcaatccacccacctcagcctccc

SEQ ID NO: 54191 - DNA, 201 bp, Homo sapiens
atagagaatgcatatttctcactttaacagatattgccaaaatgcccatgaagatagtcatgttggtttatgcaccaacaagcatgtatgagaatgctggyttccccacagtttcatcagaacatactatcagacaaaactgattttaaatcatacccatttttgtaaaaatcatatctcattgctttaattcctcttagc

SEQ ID NO: 54192 - DNA, 201 bp, Homo sapiens
gttttaacttaaacaaaagttgtttatatatacgtgtgtgtgtgcatgtgtgtattaataaatatagacagtgtaacttacccagaagagttccttatgcstatgttctgaaaaagacagcacagatgcccaaaaatataagaaattttataaggggcttttagtggtccaagattctcctgctggcttctatgagtgata

SEQ ID NO: 54193 - DNA, 201 bp, Homo sapiens
ctatattttcaccttgtatgcaacctcctgggataccattacatatatatatatatatgtgtatacacacacacacatatatatatacacaaatacatatrtatacacatatatgtgtgtgtgtgtatatctgctatatacatatatatgctatatatatatacacacacacatattatagctaggtatggctttatgtag

SEQ ID NO: 54194 - DNA, 201 bp, Homo sapiens
gtctattcctcttctagcctggagtatctctacagcttccaaacatatctcctgttctccattttctccttacacttttttttttttttttttttgaaacrgagtcttggtcttgtcgcccaggctggagtgcaatggcacaatctcggctcactgcaacctccacctcccaggttcaagcgattctcctgcctcagcctc

SEQ ID NO: 54195 - DNA, 201 bp, Homo sapiens
taccattacccaattccaaggccacttccacattcctacatatttgttatagcaggactccacttcctgctaccagaatctgtattagtttcctggggggsgggggagcagtaacaaattactataaactgggtagcttgaaacaacagaaatttattctctggaggctaaaagtccaaagtcaaggtgtcagcagggttg

SEQ ID NO: 54196 - DNA, 201 bp, Homo sapiens
gcagaagtctccacccagttcgaacttcccagtggctttgtttacactgtgaccgtaaaaccacctactcaagcctcagcaatggtggatgcacctacccmaccaagctcgaatgccccaggtggatctcagactgctgctgtgctggcagtgagaatttcaagccagtggatcttagtttcctgggccccataggggtgg

SEQ ID NO: 54197 - DNA, 201 bp, Homo sapiens
gccactattcagcctactatcccttttgctccccaaatttcatgtctgtccacatataaaacatgttcacctcatctcaacatctccaaaagtctcagccyatgataacatcagcactaagtccaaaatctcacctaaatattatcagctccaaagcctcagatcttgtcatctaaatcagatatgggtgagactatgggt

SEQ ID NO: 54198 - DNA, 201 bp, Homo sapiens
gaaagaaagagaatgatgcatataaaaacagaagaagaaagtcactagttgcataataattaatcaggataaaatgtgttatttaaaaccattcaatcacygccttttcttttctcattcttacagggtactcataagtataatcatctgactgtatctttgaaatagaattaggatttgggaagcatcttaataaacact

SEQ ID NO: 54199 - DNA, 201 bp, Homo sapiens
ccactctgaagaaaacatcattaatcatgtcattgataagagattctgtcagcattacatttagaaatttatacccagactaaattcccgtaaacaactcmcgtgtgcattagggattagaaaaaaatgaaggcttctttgtttactataacactaaaaaaatattgtttaggcccaatttctcaaaatggaaaccaccca

SEQ ID NO: 54200 - DNA, 201 bp, Homo sapiens
ccaacatggtgaaaccccatctctactaaaaatacaaaaattaaccaggtgtggtggcatgcgcctgtaatcccagctactcagaaggattgcttgatccygaaggagatggaggatgcagtgagccgagatcgctagccactgcactccagcctaggtgacagagggataccctgtttcaaaaaaaaaaaaaaaaaaggc

SEQ ID NO: 54201 - DNA, 201 bp, Homo sapiens
tacaaaaattaaccaggtgtggtggcatgcgcctgtaatcccagctactcagaaggattgcttgatcccgaaggagatggaggatgcagtgagccgagatygctagccactgcactccagcctaggtgacagagggataccctgtttcaaaaaaaaaaaaaaaaaaggcctttttaactataaaggtatatgtgattccac

SEQ ID NO: 54202 - DNA, 201 bp, Homo sapiens
ataagcataagaacactatagcctcagctaggaggcccactgcttagctaccatagggtgaatatgttctgcagcatgtgttatttactattcaatgggcygtcttttgtttattttgtattttgtagagaagtttgtcccaaatgactgattaagcatgtggaaataataatgttgaatatgcttcatataagcaagaaa

SEQ ID NO: 54203 - DNA, 201 bp, Homo sapiens
ggctgtggaaacatttctttcaattatgttttaaaattatattttactggtatttaggaaagatgtcattttatcttacatactttcactttactgacctstcttatgaattctgagtttttcttttgattgttggattttttgttggcaatcatgacatcttcaaataatgaaagttttggctctttccttctggtattg

SEQ ID NO: 54204 - DNA, 201 bp, Homo sapiens
tggggcccagtaggatatttagcaatgaaaaggtcaagatgggtggaggtaaagctaaatcaaaaggaacaggtataactgagaatccaagatagatagtstccaaatagatggtgacagatcaatcttcctcctctcaagaagcatttactgtacttgttgcttcctctcaagatcccaatggctgctcaagctgaaagt

SEQ ID NO: 54205 - DNA, 201 bp, Homo sapiens
attgatataaatgctttaaggtttgttttgtgattgtttatgattaaagttgactactctgagtgtttactgagcttttggttggaaatctgtcgttttawacaataaatgtgtatatagcaactaaataaagctgagtgaaacaaatagaataggagaaatttttgtgattcagaaatgtggctttaattctgagtgtta

SEQ ID NO: 54206 - DNA, 201 bp, Homo sapiens
ggtgacgcaaagagagggccacatggagcagatatggagaaaccagacacagcttatccttcaggaaatgggctgaaggcctcctggaaagggcagttgcragagttgttggagtcactggctggtctctcaacctatccccaaataaaacctatctccaaagctccctggcagtatgcctgatggagaaggagcatgtcc

SEQ ID NO: 54207 - DNA, 201 bp, Homo sapiens
aagggaagcatgggatgactgcagtaactcggctagctgaagcaatcttgcaggcattaatcatgatcaaaagctccattagactgtcgttgatttcgccmcaaccactctgaacgatgtagacatcctctccacgcacactctcatcaatttccacgcaggtctcctggttgctgaatttcttagtcaccaccttgccta

SEQ ID NO: 54208 - DNA, 201 bp, Homo sapiens
ctctcatctcagcatttcagcctctggagtagctgggactacaggcatgtaccacgattcctgagttgatttaatgacattttaacagaatcctccctccytctctctctctttctctaaatatgggtgtgagctctcagccaatgggaattcgtgtgtagtgtgacgaactgtataaaacagttctcaggcaataagcat

SEQ ID NO: 54209 - DNA, 201 bp, Homo sapiens
ctgccttagcacctatattctctagaaaacagaaccaaaggcaaggcttacatggtaatgttttgttgaaatgttcgatcacacagcagctaaagtgacaraaaagaaaatcgagacagaaaaagatgggaagcaaatacaaggtggtgctttaccattctgaccacagcttctaacaagcccagaagagacatggctact

SEQ ID NO: 54210 - DNA, 201 bp, Homo sapiens
tgaaggagaaagagcacaggttttgcaatcagacaaaactgggctaggtccttccttgaccacgttttagctgggtaaccaagccctgttacttaactttsccaagagtcaggttgcttgttttgaaatgaggatagtaaagtctatctcatgtaggtgttgtgaagattaaattgggtagcatatgcaaaggtcaagcgc

SEQ ID NO: 54211 - DNA, 201 bp, Homo sapiens
gagaggggagtaggttgtgagagttgagaatgaaggaggactgttacattttactgctatcagtgtggcatttgaacatttattacttttgtagtaaaaawgatgaacaaaatgtatttggtaattaaatgtttgttagcaaattttaagtatacagcttctatggcgtatcggggctggaaatagtgaggaaggaggcag

SEQ ID NO: 54212 - DNA, 201 bp, Homo sapiens
gatcaaccatttatatcttgctaattgtgtgcctgacatttggataccagggtgtttttatttagcctaaaaccaaatcatcatttttttcatattgtaarataaccaaataatttaagagattttctcaccacacttctgggcttccttaatgtgttgggttcatgaataggataaactcagaaatgggataagaaatgg

SEQ ID NO: 54213 - DNA, 201 bp, Homo sapiens
tatcttgctaattgtgtgcctgacatttggataccagggtgtttttatttagcctaaaaccaaatcatcatttttttcatattgtaagataaccaaataawttaagagattttctcaccacacttctgggcttccttaatgtgttgggttcatgaataggataaactcagaaatgggataagaaatggggtaggcaacaaa

SEQ ID NO: 54214 - DNA, 201 bp, Homo sapiens
ttctcaccacacttctgggcttccttaatgtgttgggttcatgaataggataaactcagaaatgggataagaaatggggtaggcaacaaagatgggtaagrttcagcaatgtctgtgaaaaacattacttagctataaaaaggtagttttatatattgaatgaggtattattataaactcaaataaacagctatgttttaa

SEQ ID NO: 54215 - DNA, 201 bp, Homo sapiens
aagaagtattacagaagcttcttcccactagatggtgagcctaaaggcagggagattagtgatggtagagtcaatttgattttgctgtgcccaggacaacsaagaggtctattttagcttgagttggctcttcaacctctggtaataatagctaattttctgagtgcttactatagaccagacacataaaatcccaccacc

SEQ ID NO: 54216 - DNA, 201 bp, Homo sapiens
ccaaagcctcagatcttgtcatctaaatcagatatgggtgagactatgggtataaattatcctggggcagaaattcctctctatctctggatcacgaacayagaaaacaagttatctaattccaaagtaaaagagtgggacaggcattgcgtatccttatgcatgaattgggtttacaatatatatccttatacattccta

SEQ ID NO: 54217 - DNA, 201 bp, Homo sapiens
attagttaaggcctattctagtcctgaaattctctgattttcataaattgtaccattcattcagatacattatctttacatgacaaaattcctctattccyatccttatggttaattatttaatttatgaaataaatctttttgttaatttacctaagaaaagcaaagctttattcttataaaatatactactacactcca

SEQ ID NO: 54218 - DNA, 201 bp, Homo sapiens
ataatgttgaatatgcttcatataagcaagaaaatagtgttacaatgggtcttaaaaatagaagccttggagaggcttttgaagaggcactttccaggatrcaatcaaggaagcagaaggttaagaccatggagaaactagatattgataagtgctaactgacattaaaaaggccatcctaagcatcactgtgatctagat

SEQ ID NO: 54219 - DNA, 201 bp, Homo sapiens
aatacaaaggtctttcagagcatccagctcttacttccagactttctccttcatgggctttcccctatactttaaaaaaaaaccttgtttatctgccttgrgattttctgaattaattcacaatcaggttagctattagaatgcaatatttacttttataagatcaaagtacaaactttatttatgaggacccatgagaga

SEQ ID NO: 54220 - DNA, 201 bp, Homo sapiens
tggacctaggtctctgcctctccgtggggagatttctttgcttctgactccattaggcatagccaggcatgccaatgtttatgaccccaccatgcccagtrtttattctctccacattgtttttttcataatttgatgagcagacaatatgtgaaggagaaagagcacaggttttgcaatcagacaaaactgggctaggtc

SEQ ID NO: 54221 - DNA, 201 bp, Homo sapiens
tattttttgttttcagtatctccaagaagtactttcaggaaacactagtggtagtagtttctgagtcccttaatattgtcttcatatgtcaatgatagttyggctaagcacagaaatttaggtgaaaaataatattcctttagaactgtgaggaaattattccattttgcttacagcccaagcgttcaaatgaaaaattta

SEQ ID NO: 54222 - DNA, 201 bp, Homo sapiens
tttccctaatttaaggtaaactcttatatacctgatgtgggatgtagaaagttacactggagcaagctggatcttctgctgaacttttaatcaaacctaaraaaaaataaaggcaaggtttgtttttattaatcttattttattttaaaatagcataacctagaagttattctgttataaaggaacatggctgaacaggta

SEQ ID NO: 54223 - DNA, 201 bp, Homo sapiens
attttgcacataaactttgactcatcatgtatacttctaggaatctatttcagagaaattttcacaagcaccccaaatatatatggctacatagtagtgtwgctgtattcattcatgcaataaatattttgtgaacacctcctatatgtcaggtattatactacttctagggtataaaaattgtgcatgacaaatagtaat

SEQ ID NO: 54224 - DNA, 201 bp, Homo sapiens
tctacagtcataaaatgttaaagatagatatggccttagagaccacctagtctgattatcacacttcactgacagggaactaaggctcagagaaatgaagyaacctgcctgggatctatcagctaaatagaggcagagtgtggattagaatgtgggactcctgaatttccaagtagggccttatcaactatacactttcaa

SEQ ID NO: 54225 - DNA, 201 bp, Homo sapiens
ggccaatcctcaaaattacattgctggtacacaaggggcatggcaggatggatgatggagagtcaatatcaattacagtacaatattctaaataggaaatkatcgtactcgtctttgtattcccagtagctagcacagtttctggtatataacaatactcagtaaatggctaacgaatgaacaaatcatttttgcctgggt

SEQ ID NO: 54226 - DNA, 201 bp, Homo sapiens
tacagtacaatattctaaataggaaatgatcgtactcgtctttgtattcccagtagctagcacagtttctggtatataacaatactcagtaaatggctaaygaatgaacaaatcatttttgcctgggtgccacatttccatttggcaacttcaccaaacaaaggaacctgttataactataggattcctctaaatgaaact

SEQ ID NO: 54227 - DNA, 201 bp, Homo sapiens
tctagtaggagaaatttaattaagtttcaagacctaagactaattatatgtggcttgatgcttgctatagacaaaatgtttgtgtctccccaaaattcctrtgttgaaatcctaacccctactatgatggtattaggaggtggaaactttggtgggcgattaggtcataagggtggagcccccatgaatgggattagtgcc

SEQ ID NO: 54228 - DNA, 201 bp, Homo sapiens
gcgtcgtagcagacacctataatcccagctagtggggaggctgacgcaggggaatcacttgaacccaggaggcggaggtgcagtgagccaagattgggccrctaccctccagcttgggtgacagagggagactctgacaaaaaaaaaaaaaaaaaaaatccctttaagattttgattaggttcacactgacttgataggaa

SEQ ID NO: 54229 - DNA, 201 bp, Homo sapiens
tgaaatgaggatagtaaagtctatctcatgtaggtgttgtgaagattaaattgggtagcatatgcaaaggtcaagcgcataattgatatagaataaataartaacagtaggagctcaataactaaaatgtagttagcattaattgaggggtttttgaaaaagtgaagatcatgtaacagatttatgatgtaggttaaaaaa

SEQ ID NO: 54230 - DNA, 201 bp, Homo sapiens
taagtgggccctcaccaggcacagaatcttctagcaccttgatcttgcacttttcatcctttagaactgtcagacgtaaatttctgttgcttataagctaygcagtctatggtagtttatcacagcagtctgagtggactaagatgatgctccacttgctggggccacagctctagcctctgagtctgcagcaatggctcc

SEQ ID NO: 54231 - DNA, 201 bp, Homo sapiens
agcaccttgatcttgcacttttcatcctttagaactgtcagacgtaaatttctgttgcttataagctatgcagtctatggtagtttatcacagcagtctgrgtggactaagatgatgctccacttgctggggccacagctctagcctctgagtctgcagcaatggctccattagcctctgggcctatggcggcagctcagt

SEQ ID NO: 54232 - DNA, 201 bp, Homo sapiens
agaaaccagacacagcttatccttcaggaaatgggctgaaggcctcctggaaagggcagttgcaagagttgttggagtcactggctggtctctcaacctayccccaaataaaacctatctccaaagctccctggcagtatgcctgatggagaaggagcatgtcctgagtggcacagagctgagcttcacagacttgcccca

SEQ ID NO: 54233 - DNA, 201 bp, Homo sapiens
tgtagcatttcatcgttttcactcagaattaaaggtcctccatactctagccccagtttacctttcagacacctccactgcccacccactcccagaacctstacactgcagttttatgatgaaatttttctgactctgcctttaatttcttcctcgcctctgacatattttagtgtacagacatgcctttttacacatttt

SEQ ID NO: 54234 - DNA, 201 bp, Homo sapiens
gggcctcatggctgcctatgatgccattttgactggctagctagactataatgtggtataatatatataaatgaggggtatggaagcagattgaagtttgwtcttaaaagcaatgtaaacatgtaaaacttgcttgacttctctcagctgcaatgatccaatctgtaaaatggggttaacaatagtgcctgcctcataagg

SEQ ID NO: 54235 - DNA, 201 bp, Homo sapiens
ttaaattgggtagcatatgcaaaggtcaagcgcataattgatatagaataaataagtaacagtaggagctcaataactaaaatgtagttagcattaattgaggggtttttgaaaaagtgaagatcatgtaacagatttatgatgtaggttaaaaaatcaatatgaattatgacagtttttagaattaaatttattttatag

SEQ ID NO: 54236 - DNA, 201 bp, Homo sapiens
ggtgccagtaatcccagctactagggaggctgaggtgggagaatcgcttgaacccaggaggtggaggttacagtgagccaagaacatgccaaaaagaaatrcagcagcttattagaaatacctctcccctgaattactgaaatagaatttttgttttaaaaaggtccccagacaatttgtacactcttaagttttgagaag

SEQ ID NO: 54237 - DNA, 201 bp, Homo sapiens
caatcttgcaggcattaatcatgatcaaaagctccattagactgtcgttgatttcgccacaaccactctgaacgatgtagacatcctctccacgcacactytcatcaatttccacgcaggtctcctggttgctgaatttcttagtcaccaccttgcctagctccaggcccaggcggtcagcaattttctgggataagtcct

SEQ ID NO: 54238 - DNA, 201 bp, Homo sapiens
tgaaacttcttttctttgagaacgttgaatattggcctccattctcttctggcttgtagcgtttctgcaggcagatctgctgttagtctgatgggcttccstttgtggataacccgacctttctctttggctgcccttaacattttttccttaatttcaaccttggtgaatctgatgattatgtgcctttgggttgctctt

SEQ ID NO: 54239 - DNA, 201 bp, Homo sapiens
ttctaaaaatcccgtggcttaatttagaagcactaatagtatttgtagtttcaatttatttttctcttactattctgtgtgtcacacatttttcagtgttktttaaaaaacaaaacagattctaaacaggtttaatattacctaaataggattaaatgctaatgtgaacatttaaaacccatacttggttgcattttcctt

SEQ ID NO: 54240 - DNA, 201 bp, Homo sapiens
ttgtttcttttccttctaacagtcaggactctctgctgccagtctgatagagtttgctggaggtccgctcccaaacttgtttgcctggatatcactagtgraggctgcagagcagcaaagattgctgcctgttctttcctctgggagcttcgagccagaggggcacctgccagatgccagccagagctctcctgtatgagg

SEQ ID NO: 54241 - DNA, 201 bp, Homo sapiens
gaatttccaagtagggccttatcaactatacactttcaagccttttctttgagatttatcagaataaaggaaaaatttaaaagtactacaaaatatttgcwttttttttctcttttaccaagcaactacaataaagaacaaaatcccaaacatgagactggaaagttttttgctttcaaaacaaaaacttttcccagaaag

SEQ ID NO: 54242 - DNA, 201 bp, Homo sapiens
tgctgccagtctgatagagtttgctggaggtccgctcccaaacttgtttgcctggatatcactagtgaaggctgcagagcagcaaagattgctgcctgttytttcctctgggagcttcgagccagaggggcacctgccagatgccagccagagctctcctgtatgaggtgttttttggcccctactgggagttctctccca

SEQ ID NO: 54243 - DNA, 201 bp, Homo sapiens
ccttttctttgagatttatcagaataaaggaaaaatttaaaagtactacaaaatatttgcattttttttctcttttaccaagcaactacaataaagaacawaatcccaaacatgagactggaaagttttttgctttcaaaacaaaaacttttcccagaaagaaatgaaccattagtagtgtcagggaagtagctttgttat

SEQ ID NO: 54244 - DNA, 201 bp, Homo sapiens
agctagttatctggccctattgatcctattgattgatcaatgccttatttatctataatatgccagttttatcatatatatgaatatttgaggtaatgccttttttttttttttttaaagagatgaggtcttgctatgttgcccaggctggtctcttaacttctgggttcaagtgattctctcatctcagcatttcagcct

SEQ ID NO: 54245 - DNA, 201 bp, Homo sapiens
gacatctgttttatcattggctgcatttcacaagttacaggtaggaatgatgcctattgaatagtatcttctattaaggacattgtttcttaaattattcyggaaacaaaaattgcgatatagagacaatgccttatctttctccttcccaaggcaagcatatttaaatgtcatctctatggatctgtgagaattactgta

SEQ ID NO: 54246 - DNA, 201 bp, Homo sapiens
aatatacatttgattatacaaatcatggaaatgttttccaaattcaccagaaaagttgaattaatggatagaagatttctcccataaaatatttttaaaamctctgacacttgacaccatttgtttgcattagaacaaaatatgatagtgtgttccatgcagtgcaaaattgtttataatttcatacaaaatatatctgcc

SEQ ID NO: 54247 - DNA, 201 bp, Homo sapiens
ggctgacgcaggggaatcacttgaacccaggaggcggaggtgcagtgagccaagattgggccactaccctccagcttgggtgacagagggagactctgacaaaaaaaaaaaaaaaaaaaatccctttaagattttgattaggttcacactgacttgataggaaactatcatgtttgcaatattgttcttcctatccaagtt

SEQ ID NO: 54248 - DNA, 201 bp, Homo sapiens
tgcaggcattaatcatgatcaaaagctccattagactgtcgttgatttcgccacaaccactctgaacgatgtagacatcctctccacgcacactctcatcratttccacgcaggtctcctggttgctgaatttcttagtcaccaccttgcctagctccaggcccaggcggtcagcaattttctgggataagtcctggtggg

SEQ ID NO: 54249 - DNA, 201 bp, Homo sapiens
ttagactgtcgttgatttcgccacaaccactctgaacgatgtagacatcctctccacgcacactctcatcaatttccacgcaggtctcctggttgctgaayttcttagtcaccaccttgcctagctccaggcccaggcggtcagcaattttctgggataagtcctggtgggagctgccgctgaagattttgatattcggcg

SEQ ID NO: 54250 - DNA, 201 bp, Homo sapiens
cgagaaggacagaccgcttgaggtcaagagttgaagaccagcaaggccaacatggtgaaatcccgtttctactgaaaaaaaaaatacaaaaattagcaggkcgtcgtagcagacacctataatcccagctagtggggaggctgacgcaggggaatcacttgaacccaggaggcggaggtgcagtgagccaagattgggcca

SEQ ID NO: 54251 - DNA, 201 bp, Homo sapiens
aggacagaccgcttgaggtcaagagttgaagaccagcaaggccaacatggtgaaatcccgtttctactgaaaaaaaaaatacaaaaattagcagggcgtcrtagcagacacctataatcccagctagtggggaggctgacgcaggggaatcacttgaacccaggaggcggaggtgcagtgagccaagattgggccactacc

SEQ ID NO: 54252 - DNA, 201 bp, Homo sapiens
ggccaggtacagtgcctcacacctataatctcagcactttgggaggccgagaaggacagaccgcttgaggtcaagagttgaagaccagcaaggccaacatrgtgaaatcccgtttctactgaaaaaaaaaatacaaaaattagcagggcgtcgtagcagacacctataatcccagctagtggggaggctgacgcaggggaa

SEQ ID NO: 54253 - DNA, 201 bp, Homo sapiens
aaatgtgttgcttataaataggatatggttagattttattgtatctcctaatcaaagttataagttaatgaatacctttcccctcctctcagaaaatgcaragatcttcatgtcatttaacttcatttattccctcctgatataaatagtagcagccagctattatcattttgtctcttttctttcttcctttcttctttt

SEQ ID NO: 54254 - DNA, 201 bp, Homo sapiens
cattctgcaatattaatttatgtgtccattcctgcatcaataccacattttaatcactgtagctttgaaatgttttaatgtattgtgacacagaaaagatsttgaatatttttgcttatttacttttccagatgaactttaaaataagcttgtgtcaaattctcttatcttaaaaatccctttggccaggtacagtgcctc

SEQ ID NO: 54255 - DNA, 201 bp, Homo sapiens
atgtactcttgagtggataggtgcgatatacatattcatgcattagatctgggatctggtttgtttgtagtattatttacatcttctatagctttactgawttttttgtctgctttatcaaatactgaaagaaataggtttccacagtgactgttggtatatatcgatttctccttacatagccctttgttatttctcttt

SEQ ID NO: 54256 - DNA, 201 bp, Homo sapiens
aactttattgacttcaagattatttactatttactttcatctcaactttgagtttattttgctgtcccttttctaatttgaaatgtgtgcttagcttactrtttatcactagtaaagctatatatttttcctctaagtactattttacctgaagttttatgtgtagtatttttgttattgttcagataaggccagtttcca

SEQ ID NO: 54257 - DNA, 201 bp, Homo sapiens
aaatcttagcataaaataataatcttggaatgacagcaaggttacacgagctgaatatgtcattgtaaaagacaaacgaacatatagagaggttccataastagtaaattgcaaataagaaaatatcttttcaatatttctgtgaaatattttaaagtatttcaaagcagtttttgataatgaatattttgtttctcacat

SEQ ID NO: 54258 - DNA, 201 bp, Homo sapiens
acaggtaggaaacagattccccattatgagttctccttatggcttctgcaaggatcatggagatgtcaattactcgtattttggagcaatgcttcatcttmtcatcttgaggtatggtattggtgactaccactgcttcaaagcatgcagtgttgatgcgagaaatggctgggccagaaaagattccatgagtcaagatag

SEQ ID NO: 54259 - DNA, 201 bp, Homo sapiens
ctttaatcttaactcatttgactcacagttccagatcattattgtaacattactttacctcatttattttattcataataatcatccacaatactttgggwaaacaatttcctacaaagcttcacattgatataaatgctttaaggtttgttttgtgattgtttatgattaaagttgactactctgagtgtttactgagct

SEQ ID NO: 54260 - DNA, 201 bp, Homo sapiens
cactgtgatctagattgaccaacaattgtatgaagatagctaggaaaaaactaaggtaggagtctcatccccacttcggagactctgagtagaccgcagamgtggttgccaaggcaggatatcaggaaagcatctccatagggactttgtgatagcaattctctgatagagttgattcagttatgtacctctttccagtaa

SEQ ID NO: 54261 - DNA, 201 bp, Homo sapiens
tcagctaatggatggagatttctgtttcaaataaataaaaggagaaaatctaggcttttttcatgtccacataatgtgaccaaaactcttctagctgtttsacacataaacgtttatattaaattacagcagttgtgcgaggtattttgtctcttttgtggaaatgaagaatcaaagattcaaagacatatattaattggt

SEQ ID NO: 54262 - DNA, 201 bp, Homo sapiens
gaagttatttatcccattcttttcttctctggcttgctccttgcccttgaattttagaaaataccttatttaaactcaggtttttctataatgtgaatgaktgttgttaataacctccatccaaaactagacaagatccttaataaatttacactaaccctaactcctcccagcctcaaaattgcttcatgatgtggccca

SEQ ID NO: 54263 - DNA, 201 bp, Homo sapiens
aggtggtgctttaccattctgaccacagcttctaacaagcccagaagagacatggctactccttggcaggtgcatctgcccagccttgcatgaagtcttcrgatgagttgtataaaaaattaaccccagaaccgtccatcaaacagaaaaaaaaaacaaaaaaaaaaacaagggactttatctactgactctcccactggt

SEQ ID NO: 54264 - DNA, 201 bp, Homo sapiens
ctgggatatcaaaaaagccctgaatttgagaagcatgtaggtccatggtgatgatatgatccgcacctgctatagagagcatatttgcaacaagcttggcrgagattggggaccggctcttatccttcttatcctgtcgggcataagggaagcatgggatgactgcagtaactcggctagctgaagcaatcttgcaggcat

SEQ ID NO: 54265 - DNA, 201 bp, Homo sapiens
tttagtggtgatttctgagattttggtgttcccgtcacctgagcagtgtacactgtacccgatgggtagtccttttatcccttacgcccccttccactctyccccgactccccaaaatccatgacagcattcttatgcctttgtgtcctcatagtttagctcccacttataagtgacaacataggatatttgttttttcca

SEQ ID NO: 54266 - DNA, 201 bp, Homo sapiens
atttgaatctcagctttgttgttggtggtgtatagcagtgttattcatttgtgtacattaattttgtatcctaaaactttactgaattcatttatcagatytaggagctttttgaatgagtctttgtgatcttctaggtatacaatcttatcggtaaacagccacagtttagcttcctctttactgatttggatgcccttt

SEQ ID NO: 54267 - DNA, 201 bp, Homo sapiens
gcttcctgggttcacaccattctcctgcctcagcctcccgagtagctgggactacaggcacccaccaccacacccggctaatttttttgtatttttagtaragaccaggtttcactgtagccaggatgttttccatctcctgacgtcatgatcagaccgcctcggcctcccaaagtgctgggattgcaggcctgagccaca

SEQ ID NO: 54268 - DNA, 201 bp, Homo sapiens
acctcaggtgatctgcccactttggcctcgcaaagtgttgggattacaggcgtgagccactgcggccggcctgaaactattattattattattattattawttatttatttatttatttatttatttatttatttattttttgagacggagtctcgctccttagccctggctggagtgcagtggcgcgatatcggctcact

SEQ ID NO: 54269 - DNA, 201 bp, Homo sapiens
gtgatctgcccactttggcctcgcaaagtgttgggattacaggcgtgagccactgcggccggcctgaaactattattattattattattattatttatttwtttatttatttatttatttatttatttattttttgagacggagtctcgctccttagccctggctggagtgcagtggcgcgatatcggctcactgcaagct

SEQ ID NO: 54270 - DNA, 201 bp, Homo sapiens
ctcatgatagtgagtgaattctcatgagatctcacggttttataagtggtagtttatcctgcatgctcacacacacacacactctctctctctgtctctcrcttgccaccatgtaagatgtgcctgtttccccttctgccatgattataagtttcctgaggcctcctcagccatgcagaactgtgagttaattaaacctct

SEQ ID NO: 54271 - DNA, 201 bp, Homo sapiens
caggtgatctgcccactttggcctcgcaaagtgttgggattacaggcgtgagccactgcggccggcctgaaactattattattattattattattatttatttatttatttatttatttatttatttatttattttttgagacggagtctcgctccttagccctggctggagtgcagtggcgcgatatcggctcactgcaa

SEQ ID NO: 54272 - DNA, 201 bp, Homo sapiens
gtgtttacattgacatcttaatggatccttgtaataacaggctctctcctcatgcaaggatagagtgagttcccttttaaaaaagtttggtcataaggccrtgtgaaaaatttctggttaaccaaaagaggacagtttattgctttcctcagtttatcctacaggaattaagcatattttaaactatagattaaaaaatct

SEQ ID NO: 54273 - DNA, 201 bp, Homo sapiens
gaaggattgtttgagcccacgaggtcaaggctgcaatgaactatgatcacatcactgcactccagcctaggtggcagaacaagaccttgtctcaaaaagaaaaaataaataaataaataaataaaaccaaaatcttactacatatttcctgtctgaaaactccactggcaatgtgtcctcagatttcataactgaaaacat

SEQ ID NO: 54274 - DNA, 201 bp, Homo sapiens
caaaagaggacagtttattgctttcctcagtttatcctacaggaattaagcatattttaaactatagattaaaaaatctttttagtgttttaatgcttacyttttttttttttttttttttttttttttttttgagacggagtctcgctctgtcgcccaggctggagtgcagtggcatgatctcggctcactgcaagctcc

SEQ ID NO: 54275 - DNA, 201 bp, Homo sapiens
aaggattgtttgagcccacgaggtcaaggctgcaatgaactatgatcacatcactgcactccagcctaggtggcagaacaagaccttgtctcaaaaagaaaaaataaataaataaataaataaaaccaaaatcttactacatatttcctgtctgaaaactccactggcaatgtgtcctcagatttcataactgaaaacata

SEQ ID NO: 54276 - DNA, 201 bp, Homo sapiens
tcatgatagtgagtgaattctcatgagatctcacggttttataagtggtagtttatcctgcatgctcacacacacacacactctctctctctgtctctcgyttgccaccatgtaagatgtgcctgtttccccttctgccatgattataagtttcctgaggcctcctcagccatgcagaactgtgagttaattaaacctctt

SEQ ID NO: 54277 - DNA, 201 bp, Homo sapiens
attgtttgagcccacgaggtcaaggctgcaatgaactatgatcacatcactgcactccagcctaggtggcagaacaagaccttgtctcaaaaagaaaaaataaataaataaataaataaaaccaaaatcttactacatatttcctgtctgaaaactccactggcaatgtgtcctcagatttcataactgaaaacataggcc

SEQ ID NO: 54278 - DNA, 201 bp, Homo sapiens
ttctctccacattgtttttttcataatttgatgagcagacaatatgtgaaggagaaagagcacaggttttgcaatcagacaaaactgggctaggtccttcsttgaccacgttttagctgggtaaccaagccctgttacttaactttgccaagagtcaggttgcttgttttgaaatgaggatagtaaagtctatctcatgta

SEQ ID NO: 54279 - DNA, 201 bp, Homo sapiens
  misc_feature (101)..(101): n is a, c, g, or t
tcatctaaatcagatatgggtgagactatgggtataaattatcctggggcagaaattcctctctatctctggatcacgaacacagaaaacaagttatctanttccaaagtaaaagagtgggacaggcattgcgtatccttatgcatgaattgggtttacaatatatatccttatacattcctattcaaaaagagagaaatt

SEQ ID NO: 54280 - DNA, 201 bp, Homo sapiens
aagcttcttcccactagatggtgagcctaaaggcagggagattagtgatggtagagtcaatttgattttgctgtgcccaggacaaccaagaggtctatttyagcttgagttggctcttcaacctctggtaataatagctaattttctgagtgcttactatagaccagacacataaaatcccaccaccattttacaggaaag

SEQ ID NO: 54281 - DNA, 201 bp, Homo sapiens
tctccagttcctttcttcctcagaatttgtggcagagccccaggaagaggtctcctaagacagaagctagtccgggcatggtggctcatgcctataatccragcactttgggaggccgaggcgggcagatcacttgaggccaggagttcaagactagactgaccaacatggcaaaactctgtctctactaaaagtacaaaa

SEQ ID NO: 54282 - DNA, 201 bp, Homo sapiens
tactcaaggggctgaggtgggaggattgtttgagtccaggagttcggggctgcagtaagccctgacctacaccaatgcatgccaacttggacaatagagtsagaccctgtcttgaaaaaaattaaaataaaaaaggtcaatttgatggtgactggagatagagaagtttagagcatgtgatagcttacctacattatctga

SEQ ID NO: 54283 - DNA, 201 bp, Homo sapiens
tagagaagtttgtcccaaatgactgattaagcatgtggaaataataatgttgaatatgcttcatataagcaagaaaatagtgttacaatgggtcttaaaartagaagccttggagaggcttttgaagaggcactttccaggatacaatcaaggaagcagaaggttaagaccatggagaaactagatattgataagtgctaa

SEQ ID NO: 54284 - DNA, 201 bp, Homo sapiens
ctattttagcttgagttggctcttcaacctctggtaataatagctaattttctgagtgcttactatagaccagacacataaaatcccaccaccattttacaggaaaggaaatggcaagcacacagaggttaagtagttttcccagggtcatatagctagtgcacagtagaggcaggatttgaactctgtctgactccaggg

SEQ ID NO: 54285 - DNA, 201 bp, Homo sapiens
atatggaaccaccactgtgggtagctgttccattgctgtggttaatttaaaatctgcaccaggttgcagattcaaaggttttgagcctgcttttgttaggrttggttgagaagctagcaagtttctttgagaatagccaaggaaggggaggtgagagacagaaaataggggttgacccttgaagctgatgcaatactgcag

SEQ ID NO: 54286 - DNA, 201 bp, Homo sapiens
ggtcttaaaaatagaagccttggagaggcttttgaagaggcactttccaggatacaatcaaggaagcagaaggttaagaccatggagaaactagatattgrtaagtgctaactgacattaaaaaggccatcctaagcatcactgtgatctagattgaccaacaattgtatgaagatagctaggaaaaaactaaggtaggag

SEQ ID NO: 54287 - DNA, 201 bp, Homo sapiens
gttaattatttaatttatgaaataaatctttttgttaatttacctaagaaaagcaaagctttattcttataaaatatactactacactccaggtactacgstgaagatttttgaggaattaagatggtaactcacttagaagttccccatgccatggtgccacataaaattactgaaatgggagtcagaatatttggattc

SEQ ID NO: 54288 - DNA, 201 bp, Homo sapiens
ttgctctgactaggacttccagtactatgttaaatagaagtggtgaaagtgggcatccttgtcttgttccagttctcagggaaaatgctttcaacttttcyctttcagtataatagatgacttttattaccttgaggtatttctcatctatgccagtttcgctgagggttttaatcatgaagggatgctggattttgacag

SEQ ID NO: 54289 - DNA, 201 bp, Homo sapiens
actccttggcaggtgcatctgcccagccttgcatgaagtcttcagatgagttgtataaaaaattaaccccagaaccgtccatcaaacagaaaaaaaaaacaaaaaaaaaaacaagggactttatctactgactctcccactggtcaaaatgcactctacaggagtgatgcaagtcagtttcagaagatgcaacttgcagaa

SEQ ID NO: 54290 - DNA, 201 bp, Homo sapiens
ttttgcttttgttatgtgggctcttttttggttccacatgaattttaggattgttttttctagctctgtgaagaatgatgatgatattttggtgggaattkcattgaatctgtagattgcttttgaagtgtggtcatttttacaatattgattatgcccatccatgagcatgggatgtgtttccatttgtttgtttgtctg

SEQ ID NO: 54291 - DNA, 201 bp, Homo sapiens
tgtaatacggtttaaagtcaggtaatttaatggatccaaatttatcctttttgcttttgttatgtgggctcttttttggttccacatgaattttaggattgttttttctagctctgtgaagaatgatgatgatattttggtgggaatttcattgaatctgtagattgcttttgaagtgtggtcatttttacaatattgatt

SEQ ID NO: 54292 - DNA, 201 bp, Homo sapiens
aggtgcgatatacatattcatgcattagatctgggatctggtttgtttgtagtattatttacatcttctatagctttactgaattttttgtctgctttatyaaatactgaaagaaataggtttccacagtgactgttggtatatatcgatttctccttacatagccctttgttatttctctttatattttgaggctcagta

SEQ ID NO: 54293 - DNA, 201 bp, Homo sapiens
gatcatgtttgcttcttcaagtagctgttcactgttctttttttccttattccaaatttttcatcagtttatttatttatttatttatttatttagagacwgggtcttgctttgttgtccaagctgtagtgcagtggcgtgaccatggctcactgcagcctttacctcccaagctcaagggatcttcctacctcagcctcc

SEQ ID NO: 54294 - DNA, 201 bp, Homo sapiens
agcatatttaaatgtcatctctatggatctgtgagaattactgtattttgaaggtcttttgagtcaatacccagaatatatatatatatatatatatatayacacacacacacatatatataaaaccttggtaatagtttcttgctttaccgattattcttttacccttcacaattccaacataaataattcaaagagagc

SEQ ID NO: 54295 - DNA, 201 bp, Homo sapiens
gtgagttgttcagatcctttcctgaaaacagcttttaataaaagggagaagaggaaagcctggggggagggagtgattcagctgtggagaggggtatcatraaagggggccatgtctgtctgggatacatgcctggtaatagagcaccaaagatttacttgtgattttcatgttagaattattgcccaagtggaaaacaac

SEQ ID NO: 54296 - DNA, 201 bp, Homo sapiens
tcaaggagtatttttgtggtgttctttgtgtttcctgaatttgaatgttggcatgtcttgctagggtggggaagttctcctggataatatcctgaagagtrttttccaacttggttccattctccccgtcacttttaggtacaccaatcaaatgtagatttggtcttttcacatagtcccacatttcttggaggctttgtt

SEQ ID NO: 54297 - DNA, 201 bp, Homo sapiens
  misc_feature (101)..(101): n is a, c, g, or t
atctactgactctcccactggtcaaaatgcactctacaggagtgatgcaagtcagtttcagaagatgcaacttgcagaaggagaaatcaagcaggctctcncagactcagtcacagtgacgtttaagttacaggaaacaggtgaggccaagggaatatatgagacagtgcataccatcgtatttatctgacacaatgtcta

SEQ ID NO: 54298 - DNA, 201 bp, Homo sapiens
attcaaagtgtgttctacagccagcagcctcagcatcacttgagagcttattagaaatgcagtagcaggccaggcgcagtggcttactcctgaaatcctakcactttgggaggccgaggcaggtggatcacttgaggtcaggagtttgagaccagcctggccaacattgtgaaacctcgtttctactaaaaatacaaaaat

SEQ ID NO: 54299 - DNA, 201 bp, Homo sapiens
aaatgtgtagcatttcatcgttttcactcagaattaaaggtcctccatactctagccccagtttacctttcagacacctccactgcccacccactcccagaacctctacactgcagttttatgatgaaatttttctgactctgcctttaatttcttcctcgcctctgacatattttagtgtacagacatgcctttttacac

SEQ ID NO: 54300 - DNA, 201 bp, Homo sapiens
tgataagtgctaactgacattaaaaaggccatcctaagcatcactgtgatctagattgaccaacaattgtatgaagatagctaggaaaaaactaaggtagkagtctcatccccacttcggagactctgagtagaccgcagacgtggttgccaaggcaggatatcaggaaagcatctccatagggactttgtgatagcaatt

SEQ ID NO: 54301 - DNA, 201 bp, Homo sapiens
aatgtgtagcatttcatcgttttcactcagaattaaaggtcctccatactctagccccagtttacctttcagacacctccactgcccacccactcccagaacctctacactgcagttttatgatgaaatttttctgactctgcctttaatttcttcctcgcctctgacatattttagtgtacagacatgcctttttacaca

SEQ ID NO: 54302 - DNA, 201 bp, Homo sapiens
atgtgtagcatttcatcgttttcactcagaattaaaggtcctccatactctagccccagtttacctttcagacacctccactgcccacccactcccagaacctctacactgcagttttatgatgaaatttttctgactctgcctttaatttcttcctcgcctctgacatattttagtgtacagacatgcctttttacacat

SEQ ID NO: 54303 - DNA, 201 bp, Homo sapiens
tgtgtagcatttcatcgttttcactcagaattaaaggtcctccatactctagccccagtttacctttcagacacctccactgcccacccactcccagaacctctacactgcagttttatgatgaaatttttctgactctgcctttaatttcttcctcgcctctgacatattttagtgtacagacatgcctttttacacatt

SEQ ID NO: 54304 - DNA, 201 bp, Homo sapiens
atgaagaatcaaagattcaaagacatatattaattggttactaagatagctgatagtacagctaatattataatattaacagctaatgcgccgtaatacarctgtacggtaatatagctggcacagccagaatttaccttaaactctaattctaaaactcatttttgttttcactgtccctttcagaaatatgtctgcata

SEQ ID NO: 54305 - DNA, 201 bp, Homo sapiens
ggtgtactatctttttgatataccgttggattcagatagctagtattttgttgaggattttcgcatttatgttcatcagtgatattggcctgtagttttcyttttttgttttgttctgttatgtaacagaatatgtttattctgtatcttttaattggagcatttaggctcactgcaacctctgcttcctgagttcaagtg

SEQ ID NO: 54306 - DNA, 201 bp, Homo sapiens
tacactgaagggtttgcagcagagaaagagtttaataatcacagggtggctgagtgagaagatgggaggagaccctcaaatccatctcccgaaggagttcrgagctggagtttttaagggaatcatggagggcaagaggctagaaaattggggttattgattggccagggtaaggggtataaaatcatcaggatgtgaaaa

SEQ ID NO: 54307 - DNA, 201 bp, Homo sapiens
gtctttggtcctcttttattatcttaaggcttttatttggcatgacttttcttctgcttaaagtatatccttacaaattttctaggtgctactagtgaaamactccattttttcctttttttctgataacatcttcattccaccctcattctttttattttattttattttacatcaatagtttttggggaacaggtggtt

SEQ ID NO: 54308 - DNA, 201 bp, Homo sapiens
ttcacaagcaccccaaatatatatggctacatagtagtgtagctgtattcattcatgcaataaatattttgtgaacacctcctatatgtcaggtattataytacttctagggtataaaaattgtgcatgacaaatagtaattgccctagaattgtttataaaagcaaaatatgggaaccaacaaatgttcatcaataggta

SEQ ID NO: 54309 - DNA, 201 bp, Homo sapiens
gtagtgtagctgtattcattcatgcaataaatattttgtgaacacctcctatatgtcaggtattatactacttctagggtataaaaattgtgcatgacaartagtaattgccctagaattgtttataaaagcaaaatatgggaaccaacaaatgttcatcaataggtaaattaccaaataatttattgtatatacatatgc

SEQ ID NO: 54310 - DNA, 201 bp, Homo sapiens
ctactatctgggactaccttaaatcaagtacagtgctacagtttccccagattatcttggtgatacaaccccagatggcagaactatgcaagggtggcctraggtcacaatttcttaggtatcttctctctcacaccccctcacatcattttcatctgctggctgctgcgctcacaagtcattcctctctgctatggactg

SEQ ID NO: 54311 - DNA, 201 bp, Homo sapiens
tacaatattcagagtttcctgtagtgaatattgatttggtttacaatttgacaatttcattaccatcttcaaatatttctctttttttttaacttataaartgacactgatgaaccctgggagaagcagaggctgacacctccaagcaagttctggcataaggaaatgtctgagcctgtttaccttagcaggataaataca

SEQ ID NO: 54312 - DNA, 201 bp, Homo sapiens
cctgcagccagattcgcaggatggggaagggcagatggaacagcgggccagcccaagatagctcttcacaaagccctagcctcagggggaattgagggaakaattttcctgcctccacccaaagccagcggaatcttgcccccatcccaacctgggtcccagctctggtcctagctagattctcagaatcacagggccctg

SEQ ID NO: 54313 - DNA, 201 bp, Homo sapiens
tctcgctctgtcacccaggctggagtgcagtggcgcgatctcggctcactgcaatctccgcctcctgggttcaagtaattctcctgcttcagcctcctgartagctgggattacaggcaagcgccaccatgcgcggctgatttttgtatttttagtagagacaggatttcaccatgttggtcaggctggtctcaaactcct

SEQ ID NO: 54314 - DNA, 201 bp, Homo sapiens
acaagttaccccctggagttgagtttttcttgtgcacgggcttcgcacacattgtgggtcacagcataggtgcaaaagcatgtggcaccactccagaccaygtgttggtcctgacccagtccttggatgggtctgggaccctgagcaagttgcctaacctctcactgcatagttttgtccagtgcagctgggagagaaggg

SEQ ID NO: 54315 - DNA, 201 bp, Homo sapiens
ttttgtatttttagtagagacaggatttcaccatgttggtcaggctggtctcaaactcctgctctcgtgttccgcccacctctgcctcccaaagtgctggrattacaggagtgagtcactgtgcccggccaagtatgtttacttttgtacaaaactaccaaaccgtcttccaaagtggctataccattttgcattcccatc

SEQ ID NO: 54316 - DNA, 201 bp, Homo sapiens
gtcaactcgttcaccaacacaacatggtctttattactgtagttcattgtaagtcttgaagttaagtattgacagtactctgactttgttcttcaatattktgttgggccattttagatcttttgcttcttcataaaactttagaatccattttttggtctacagaaaataacttgctgagattttgattgggattgcatt

SEQ ID NO: 54317 - DNA, 201 bp, Homo sapiens
aatacacctattgatataatcatgtgtttttttttctacggcctattgttgtgattgattacattaactgatgttcaaatgttgaaccagtctgtcatacstggaataaatgtcacttggtcatggtgtataattcttttataattctttttatgcattgttggatttgatttgctaatattttataggggatttttacag

SEQ ID NO: 54318 - DNA, 201 bp, Homo sapiens
gttagcaccgaagcctgttcctccaaggcatttgtctgctctaggccatgaggtcccaccagtctgcagacgctgatcacctctactccagtggctgatartaaggagttagaattcacacatgactccctctgcccgtgcccagagcctcacagtgcttagctgggcctccagtcaaacccacatcctctgtaacagttg

SEQ ID NO: 54319 - DNA, 201 bp, Homo sapiens
cattaattttctctattaatttcctgcttttaatttcatttatttctgctctaatctgtattacttttttcttctacttattttgaatttaatttccttctttttttctaggtttctaaggtggaatacatgcattcaatataaatttctctctaaactctatttttgttgcatcccataaattttggtgtcatattttca

SEQ ID NO: 54320 - DNA, 201 bp, Homo sapiens
gcagactggccttcaagcctaagttagcaccgaagcctgttcctccaaggcatttgtctgctctaggccatgaggtcccaccagtctgcagacgctgatcrcctctactccagtggctgatagtaaggagttagaattcacacatgactccctctgcccgtgcccagagcctcacagtgcttagctgggcctccagtcaaa

SEQ ID NO: 54321 - DNA, 201 bp, Homo sapiens
gggattacaggcatgtgccaccacgtgcagctaatttttgtgtttttagtagagatggggtttcaccatgttggtcaggctggtctctcactcctgatctsgtgatctgcccatctcagcctcccaaagtgctggaattacaggcatgagccaacatgcctggccgtatttggggatttttaaactatctttctgttattg

SEQ ID NO: 54322 - DNA, 201 bp, Homo sapiens
gcaagagcctacttgtctcccagtccaaggctgcacgtctcagtcctcttcagagagccatttcccgagggctgtgtgcatgacagggctgacaggtgacygtgatgggtgagggtgtttttactgctccccacccctcccctgtccagagccctcatgtccaggtgctggtctgggtctttccagggagcagactggcct

SEQ ID NO: 54323 - DNA, 201 bp, Homo sapiens
tttttgtttttttgggcggccatttgatttatctccctttattctattcattttgtatattacatgattttttaaacattaaaccatcttgactgcactgwtgcttgactgctgacaacttctaagcaagccccttgcctccctttcctattatgctcattatctggaaaaactgatatgaaaaccgaggtgttccttcct

SEQ ID NO: 54324 - DNA, 201 bp, Homo sapiens
ctttgctttctcatagagggtggttttattttttaaataaacacttacgtaggagtgaccatgtgccaggcactgccctgcacactttacatatatgaatmtgaaactagagcatgcaaagaagggctcttagcacttcctcagcttggctgtccaatgtaggtgtcagtgtgtcccatactctggggatttgcagcctcc

SEQ ID NO: 54325 - DNA, 201 bp, Homo sapiens
ggtgtgtgtgtgtgtgtgtgtgtgtgtgtgtgtgtgtgtgtgtgtgatgtcatcagtctcaacagctaaacgaaattttgtgtggctgtccatcttgcctytggaaggtggtcatgacaatcagcactgtgagcctgctagatgtctagatgatgactgcttccaccggagtcttttctttcttgctttggcttccagtct

SEQ ID NO: 54326 - DNA, 201 bp, Homo sapiens
tgaggttgttgatgtactgctcgaacaacggctccaggttctgcctcacagtcttggtgccctgctcctgcagcagggtccacttggtgtccagaaccttsttctgctgctccaggaaccgcacctggaggggagcagggtttgaagatagagaaacttggatttcatgttctatgatcaactcactaaggtgcctcccac

SEQ ID NO: 54327 - DNA, 201 bp, Homo sapiens
gaatggctcttaccccgtgactactggttgtgtgtctcaagcgggtgccggccctcattctacggagttttcagggaaaagactgatatgtggtcccttcyggtggtcactcatgtggaagaagagcagttactacgtggcatgctgaagccacgctcctaaaaacagatggcagccaggcgcggtggctcacgcctgtaa

SEQ ID NO: 54328 - DNA, 201 bp, Homo sapiens
ctggctgccctgacctctctcgcagagctgtgcagggaatgtaggacctggtcagcatttcatacatggagaagcccttcacagacaccagggagagggtrgtatccattcgtggaacaagggttaggcaaatcctgccatcccagcccaggattccttctcctcagagcctccactccaatctgtagggctttagtagaa

SEQ ID NO: 54329 - DNA, 201 bp, Homo sapiens
ataccaggactcggcttctgtccggctgcggttggcaatctcctcatactgggccttgacctcagcgatgatgctatccaggtccaggttgcggttgttgwccatggagaggaccactgaggtgtcagagacatgcgtctgcatctgggacagctcctgcagggagatttggagtcggtcatctggttctgtgttgtgtta

SEQ ID NO: 54330 - DNA, 201 bp, Homo sapiens
tgactactggttgtgtgtctcaagcgggtgccggccctcattctacggagttttcagggaaaagactgatatgtggtcccttctggtggtcactcatgtgraagaagagcagttactacgtggcatgctgaagccacgctcctaaaaacagatggcagccaggcgcggtggctcacgcctgtaatcccagcactttgggag

SEQ ID NO: 54331 - DNA, 201 bp, Homo sapiens
cctggaggcctgagacataccaggggaccctcggctcctgatagaacagaacagatccaagcctgaagcaagtgtctgaggactcgtagtgggatgctccygctccactcaaagatcgatatcggggtatatccccaccaccacatacactcacaggtcccgggtacagacctcactgccctcagggaagccccacccctc

SEQ ID NO: 54332 - DNA, 201 bp, Homo sapiens
ggtggctcacgcctgtaatcccagcactttgggagcccacggcaggtggatcacctgaggtcagtaatttgagaccagcctgaccaacatggagaaacccygtctctactaaaaacacaaaattagccgggcatggtggcgcatgcctttaatcccagctcctgggaaggctgaggcaggagaatcacttgaacctgggag

SEQ ID NO: 54333 - DNA, 201 bp, Homo sapiens
cagccccccaggtgtgttccagcaagctctattccactagggaagaaatgagtcatcgtatgtgttgatacaggctgaaggccgccacaaacacatacctkcaggagcttctaatctcatcaggaacatgttgagagtctgacggcctgttataacggcgaaccaccctgttccaagcagcgggacttgctctgctttctc

SEQ ID NO: 54334 - DNA, 201 bp, Homo sapiens
catctaaaagataaaaaggtgtgcaggctgtcttggtgtctccaccacataaattctgaatttactttcacatttgctgacatacaataattgacaattcktcatggtcttaatccatactgaagctcaaataatacttatacctggggatcctattaaatttaaacaaggtacccctgtaatcttggggaagttaatgaa

SEQ ID NO: 54335 - DNA, 201 bp, Homo sapiens
gcagggttttcccctctgggaaaggcaatctgtagccttatattcttggttatgtgctagagggaaaatagagtttcatccttttctgcacaatttttttsttagggaaggcacagctatcccagagcccactgggcagatctgcctgcaaggtttaggccagagaatgtgggaagccctcagcgccccctataaaccact

SEQ ID NO: 54336 - DNA, 201 bp, Homo sapiens
atttgaagcagaatatagaactgcggcacgggagaccaggggctgggaatggggctctcctgggaaccaaagaatgtggttctgcaattggcttggtctaractactctccagaaaaggataaaacatggcttgagcaactgcctagaagaggcaatctccatgggctgggttgctgcacttggaaggcagtgacttgcag

SEQ ID NO: 54337 - DNA, 201 bp, Homo sapiens
aggcagcaggttgctgcagggttttcccctctgggaaaggcaatctgtagccttatattcttggttatgtgctagagggaaaatagagtttcatccttttstgcacaatttttttcttagggaaggcacagctatcccagagcccactgggcagatctgcctgcaaggtttaggccagagaatgtgggaagccctcagcgc

SEQ ID NO: 54338 - DNA, 201 bp, Homo sapiens
ctgcgtgtgtttagcaaaagtaaaacaaaataaaacaaagtaggtgtttcttttagaactcaggccccttccttgccctctttcaatctcaccctacctgyttcttgacattgtcaatctcggctctcagcctctggatcatccggttcatctcagagatctcatgcttggtgttgcggaggtcatcgccatgccggccag

SEQ ID NO: 54339 - DNA, 201 bp, Homo sapiens
ttggcacggacagaaattcctccaacagaaagtaggcaatgggcaatgtcagaggttgaagcaaacagtagtttgacaatccaaaggtagctgagtttaaytcagctggagtaaacatgaaagccttcctgaaggaaggggtactggaggacaagggtggatggaggtgggcatgacatggatattgaggttgagcaaagg

SEQ ID NO: 54340 - DNA, 201 bp, Homo sapiens
aaattcctccaacagaaagtaggcaatgggcaatgtcagaggttgaagcaaacagtagtttgacaatccaaaggtagctgagtttaactcagctggagtamacatgaaagccttcctgaaggaaggggtactggaggacaagggtggatggaggtgggcatgacatggatattgaggttgagcaaaggacgtgagcaaaag

SEQ ID NO: 54341 - DNA, 201 bp, Homo sapiens
tacatcgtgggtggcaggacactgaaacactggtactggatctagctgcgtgtgtttagcaaaagtaaaacaaaataaaacaaagtaggtgtttcttttaraactcaggccccttccttgccctctttcaatctcaccctacctgtttcttgacattgtcaatctcggctctcagcctctggatcatccggttcatctcag

SEQ ID NO: 54342 - DNA, 201 bp, Homo sapiens
aatccaaaggtagctgagtttaactcagctggagtaaacatgaaagccttcctgaaggaaggggtactggaggacaagggtggatggaggtgggcatgacrtggatattgaggttgagcaaaggacgtgagcaaaagcagaaaaggcacaagtgtcaagaagattgctgagttgctcaggtgcttggaggacagccagtgc

SEQ ID NO: 54343 - DNA, 201 bp, Homo sapiens
ggctgggcagcaagttggctccaggcttccttcctatctgctcaggtccagcctgcagttgttttccatggacaagaatcctaagatggctgaggcgggcygtttccaaaaccctcctgagggctgagggcaggagcttgtcaatcaggcttcagagtctatactccctgttcctattcatcttgctctgaagcagaattg

SEQ ID NO: 54344 - DNA, 201 bp, Homo sapiens
ttattatcctcacttctacagaagcgaaaagagactcaagaagattaaagaacttgctaagtgtggcagccctgctggaggctgggcccagagccaggccyctcacccctgcaaggcatcgctcctgcaggatcgtcgtcaccctcatcatcgccatccttgttcctgacaggcaggagatcctggtatttttctgtgtgc

SEQ ID NO: 54345 - DNA, 201 bp, Homo sapiens
actcccgctgctgggaaatcgatttaggactagagtccccagtgaacccctaaaaattacccacagtttctagggtaggtattattgtatctaataatagyaatcatttattgctatagctaacatttattgagctcttactatgggcctgggattttatgtctcaaacaaaaagatgcaaagaagtagttattattatta

SEQ ID NO: 54346 - DNA, 201 bp, Homo sapiens
catttcagaaacgtggtctaaaatacactggtctagggcacaagaagaaggaggaggagacaagtactcccgctgctgggaaatcgatttaggactagagwccccagtgaacccctaaaaattacccacagtttctagggtaggtattattgtatctaataatagtaatcatttattgctatagctaacatttattgagct

SEQ ID NO: 54347 - DNA, 201 bp, Homo sapiens
gtcgaggagggggtacttgggggtagaagtagcaatcctgtttaaagtaaatcatgaactttggagcaaggcatggccttagaaggagactccaagagttyggttcagggagaagtacaggggaaagttccactgcagtggggtgagatggagaaggaagttagagactgaagctctgattagtcccctggaggaggcaac

SEQ ID NO: 54348 - DNA, 201 bp, Homo sapiens
atatctaccatatttcttactgttttctagttattgctcttgtttttcgttccttttttgtctcccactcttttttcatcttttgtggttttaactgagcmttttatgattccattttctctcctttttagtatatcggttatactttttttttttttttttacttctttcagtggttgccctagagtttgcaatatacat

SEQ ID NO: 54349 - DNA, 201 bp, Homo sapiens
caaaaaacactacaccacccaagctgtgcccaccaggaacctccaggatgcaggggacacattgatcaagacttccaaaggtcgaggagggggtacttggrggtagaagtagcaatcctgtttaaagtaaatcatgaactttggagcaaggcatggccttagaaggagactccaagagttcggttcagggagaagtacagg

SEQ ID NO: 54350 - DNA, 201 bp, Homo sapiens
tcattacccatctgttcttgcatgttgtgtaccttgttcatttgtgctcttagcttgttaatcatggttgttttaaattcccgatctaataattccaatayccctgccatatctgagtgtggttctggtacttgctctgtcttttcaaactgttttctaccttgaagtatgctttgtaatttttttgttgaaaatggatgg

SEQ ID NO: 54351 - DNA, 201 bp, Homo sapiens
acttgaacctgggaggaggaggttgtggtgagccaagcttgcgccattactctccagcctgggcaacaatagcaaaactctgtaggaaaaaaaaaaaaaamaaaaaaccagagtgcttactaactagagtcctgtaaaatgtcttggctgctgttgctgctgttgctcctgttgccaccgctgccgctgcctatgcctctg

SEQ ID NO: 54352 - DNA, 201 bp, Homo sapiens
tagcatcctctaacgtttcccacaatgggcatggacagtctaacccaataagtcataaattaaaattaaatcaagtccttggcatttataaattggtttgrcaaaatgggacaccatgggcctccccaagccctagttaaaatagttaatatgccccagtgtaaattaaaacaggacctttaaggagtgaagcccattaaa

SEQ ID NO: 54353 - DNA, 201 bp, Homo sapiens
cattttattgaacacattctggaggtagttagaaccaaaacaaaatttgggattggggtggggattctgttttgatgatttagatttgggaaaactttggrttctcgtgtcagcaggggccatgctgtgggaaacctgaaggctgatttgaagcagaatatagaactgcggcacgggagaccaggggctgggaatggggct

SEQ ID NO: 54354 - DNA, 201 bp, Homo sapiens
taaaattaaatcaagtccttggcatttataaattggtttggcaaaatgggacaccatgggcctccccaagccctagttaaaatagttaatatgccccagtrtaaattaaaacaggacctttaaggagtgaagcccattaaacaggatctatttagagaagggttgtttatatccattatttttccatcaacaacctaattt

SEQ ID NO: 54355 - DNA, 201 bp, Homo sapiens
agaactcaggccccttccttgccctctttcaatctcaccctacctgtttcttgacattgtcaatctcggctctcagcctctggatcatccggttcatctcwgagatctcatgcttggtgttgcggaggtcatcgccatgccggccagctgtctgctgcagctcctcatactgatgcagccaggaaagaggaaagattctgt

SEQ ID NO: 54356 - DNA, 201 bp, Homo sapiens
aatattactgaaattattgacttatccaattggcagctggtagatatttccttcttatggatttggctgtcaaatattctgttgaatgcccgttgcaacascttctcagtcacaactcgcttcaccaccaaggcggcatgacacagctttcccagatactcagggattgcctcagcagccctgccatgacatgcaattttt

SEQ ID NO: 54357 - DNA, 201 bp, Homo sapiens
aactcaggccccttccttgccctctttcaatctcaccctacctgtttcttgacattgtcaatctcggctctcagcctctggatcatccggttcatctcagwgatctcatgcttggtgttgcggaggtcatcgccatgccggccagctgtctgctgcagctcctcatactgatgcagccaggaaagaggaaagattctgttt

SEQ ID NO: 54358 - DNA, 201 bp, Homo sapiens
tctgataccaggactcggcttctgtccggctgcggttggcaatctcctcatactgggccttgacctcagcgatgatgctatccaggtccaggttgcggttkttgtccatggagaggaccactgaggtgtcagagacatgcgtctgcatctgggacagctcctgcagggagatttggagtcggtcatctggttctgtgttgt

SEQ ID NO: 54359 - DNA, 201 bp, Homo sapiens
cagagactccttcattgcagagactttataatctctgtgcttcttggagtctctgggccacccccaatagccactttcccttaaatgttatcccattctcyctgtgaatcatcaaaagaaccaatcacatctgggtagactgaccctcatggtatctctaggctgattgtaaacctagaaaaaaaaaacaattctgcacac

SEQ ID NO: 54360 - DNA, 201 bp, Homo sapiens
taccaggactcggcttctgtccggctgcggttggcaatctcctcatactgggccttgacctcagcgatgatgctatccaggtccaggttgcggttgttgtscatggagaggaccactgaggtgtcagagacatgcgtctgcatctgggacagctcctgcagggagatttggagtcggtcatctggttctgtgttgtgttat

SEQ ID NO: 54361 - DNA, 201 bp, Homo sapiens
aatgtcttggctgctgttgctgctgttgctcctgttgccaccgctgccgctgcctatgcctctgttaccagaaaagatcctcatcctccgggttataggaraaaacacacatggcacagccaaagggttaattcaactatttccatgggggaggcctcgagccctgacaatacagatttgagactccttggaggaataaat

SEQ ID NO: 54362 - DNA, 201 bp, Homo sapiens
ccaggactcggcttctgtccggctgcggttggcaatctcctcatactgggccttgacctcagcgatgatgctatccaggtccaggttgcggttgttgtccrtggagaggaccactgaggtgtcagagacatgcgtctgcatctgggacagctcctgcagggagatttggagtcggtcatctggttctgtgttgtgttattt

SEQ ID NO: 54363 - DNA, 201 bp, Homo sapiens
gaaatcccctaccatggtgttcacatctctttccagcctgtaatcagtgacatcatgttggtagcttgaaatcacctttgtgggagaatttaccccaagcraactggcaagcactacaaatcagagcttggtttattgtttggttgattgtctggagctgcacagcctcacacagctgccactagttccatgtggctaact

SEQ ID NO: 54364 - DNA, 201 bp, Homo sapiens
ggggtactggaggacaagggtggatggaggtgggcatgacatggatattgaggttgagcaaaggacgtgagcaaaagcagaaaaggcacaagtgtcaagamgattgctgagttgctcaggtgcttggaggacagccagtgcccaggaacaccggtgggggaaaagagaccagaaaagtgagttgaggtcagctatatggcc

SEQ ID NO: 54365 - DNA, 201 bp, Homo sapiens
actctgtaggaaaaaaaaaaaaaacaaaaaaccagagtgcttactaactagagtcctgtaaaatgtcttggctgctgttgctgctgttgctcctgttgccrccgctgccgctgcctatgcctctgttaccagaaaagatcctcatcctccgggttataggagaaaacacacatggcacagccaaagggttaattcaactat

SEQ ID NO: 54366 - DNA, 201 bp, Homo sapiens
ttcccagctgccagtctaattcagaacgtgtccacaaatccagggcacagaaacaaacggaaacacagaactgtacaactataaaagtatttgcacaaagmcaaaacatcttccttctttctctctctttggcatttatttcagacccacagtgattttttacaaaagatcgtagctcaccttgtcgatgaaggaggcaaa

SEQ ID NO: 54367 - DNA, 201 bp, Homo sapiens
ttaagagttatctaatacattgtagtttgaataagagtcctttatcagatatgtcttttgctaatattttcttccagtctgtggcttgccttctcattttkgcagtgtgttttgcagagcagattttaattttaatgaggtccagcttatcaattattcctttcatggatcatggctttggtgttgtatcttaaaagtcat

SEQ ID NO: 54368 - DNA, 201 bp, Homo sapiens
caggcactagtgggttgggaggtgctggagagaacagagctcagcaggacgcagaaggtggctctgttacccaggaacggtgatgccccctttttatcccytccagaactgggctgggcgagagagctgtcgagctgtgaatgattaagtgggctgggcatgcctggggggcagctgtgagctcaccggtcacacctgcac

SEQ ID NO: 54369 - DNA, 201 bp, Homo sapiens
tgaataagagtcctttatcagatatgtcttttgctaatattttcttccagtctgtggcttgccttctcattttggcagtgtgttttgcagagcagattttaattttaatgaggtccagcttatcaattattcctttcatggatcatggctttggtgttgtatcttaaaagtcatcaccatacccaaggtcatctaggtttt

SEQ ID NO: 54370 - DNA, 201 bp, Homo sapiens
ggaaggacacacttgactggcgagacatggtggcttgttcctggtggagcaagagaaccaggcactagtgggttgggaggtgctggagagaacagagctcrgcaggacgcagaaggtggctctgttacccaggaacggtgatgccccctttttatcccttccagaactgggctgggcgagagagctgtcgagctgtgaatg

SEQ ID NO: 54371 - DNA, 201 bp, Homo sapiens
ctcctcccctggccctgcctcccagccctgcctgcccttccttcatcgtgaattctgctcctggaagctccctccaaaaggtggcctcctcctgaggaccrcttttcaccacacttacttgcccaccccacagacctcgctgagcaccactgtgtagccgcaggcattggactaggtctatggaataagtgagcaggcagc

SEQ ID NO: 54372 - DNA, 201 bp, Homo sapiens
acccactccacaagcacccgcaaggctgaccctgccgaagccaccaccaccgccacccccggaccgggacacggaggtgaagctggtgcgggagacagacrgggtgatggcagaggcggtgctgaagctacgactgcccccgctccggaaggacacacttgactggcgagacatggtggcttgttcctggtggagcaagag

SEQ ID NO: 54373 - DNA, 201 bp, Homo sapiens
ggcctgacacacaggaaaccctcaattaactatagcgatgatcactattcccaccttcaaggtttatctctgtgtttatttcccattcccatttccttgaygggctctgcacctctcctttcctatcccgtcctcctgtcttttgacaccggaagcttggcctgggtacctggttctcccccagttggtgtcccaagtgtg

SEQ ID NO: 54374 - DNA, 201 bp, Homo sapiens
gccaggagctgggaattctctccatgctgccacattccagagttctggaactctgacgagtccaaaattaaaatctccaactgagcctggcctactgggtycgtctgtgggagactcaaacctcttggtccactggcctggagacattttagaagtggaggctttgtctcggagcatggaggggataggcctgcctgggct

SEQ ID NO: 54375 - DNA, 201 bp, Homo sapiens
gggtggatcatgaggtcaggagatcgagaccatcctggctaacatggtgaaaccccatctctaataaaaatacaaaaaattagccgggcgtggtggtgggygcctatagtgccagctacttgggaggctgaggcaggagaatggcttgaacctgggaggcggagcttgcagtgagccgagatggtgccactgcactccatc

SEQ ID NO: 54376 - DNA, 201 bp, Homo sapiens
agcagcacactttagttaccagcacaccactgtctccacccctctcgctaccctgtgagcccattgcccaggccctgtcctttgtggcactgacagcctgycccttcccttccttcattttccaaatccgcagagtctcagaggtgtggactagaggtccctgcgcctcctcttcccctcctcccttttttccactttgga

SEQ ID NO: 54377 - DNA, 201 bp, Homo sapiens
gggctgagcaggaagggaggggcaggcctgcagggggctgtggggagcagccttggcccccatcccttagattcagcagccgattggccctggcaggagarggtgcagagcagagccctccgcttccctccagcaggcccctgcaagtctgaggaatgttcttccctcgtatgaaaggtgttttgctcatggcacaccaaa

SEQ ID NO: 54378 - DNA, 201 bp, Homo sapiens
ctatgctggtttgttggttgcagccactggccagccatgggcataagagtttggcaaaagccaactgaaagcattccatgagggtcacttggctgtatcargtttataataaagagtattgtagggctgggcacggtggctcacgcctgtaatcccagcactttgggaggccgaggtgggtggatcatgaggtcaggagat

SEQ ID NO: 54379 - DNA, 201 bp, Homo sapiens
tgagctgttattaaacatagccataattcaaattaaattatgtaaaattatagttaaatacattgcattaaaaacaaagggaagaaatgtttaaaactcaycattttctaattttattatactttactttgatatattatcaaagttcttgtggttgttgacatttattgaatctacatgcagaaatcccctaccatggtg

SEQ ID NO: 54380 - DNA, 201 bp, Homo sapiens
tctaacatagctctgggctcctcctttgagtaagtagttttagagatagacctttcttgtttcctgggtccctgttcattctccagcctggaaggccaagsctttcccttgctctctgatctcaggcctcttctcccaccacacaaggaacctctcctgcaacacttaggagagggctgggttgtggggccagggttcatg

SEQ ID NO: 54381 - DNA, 201 bp, Homo sapiens
agtgtcgtcatggcctagaatcctagacatgggtgtgtcccctcactcaggagacagtcatcagagcacccaccttggtctgataccaggactcggcttckgtccggctgcggttggcaatctcctcatactgggccttgacctcagcgatgatgctatccaggtccaggttgcggttgttgtccatggagaggaccactg

SEQ ID NO: 54382 - DNA, 201 bp, Homo sapiens
aggctgtgccatgcaacctgaagtgattttgtgtgcctgcagcagcataccctttcttcccagggagctcggctttaccacatctgccctcccctctgccyctcctcaagccttggccccagacgacttctaacatagctctgggctcctcctttgagtaagtagttttagagatagacctttcttgtttcctgggtccct

SEQ ID NO: 54383 - DNA, 201 bp, Homo sapiens
ctccagaccatgtgttggtcctgacccagtccttggatgggtctgggaccctgagcaagttgcctaacctctcactgcatagttttgtccagtgcagctgrgagagaagggaggggcctgggctcattggaggggccatgcaagctggaattttaattttgagctggctggggctgagcaggaagggaggggcaggcctgc

SEQ ID NO: 54384 - DNA, 201 bp, Homo sapiens
ttatatgagtcaaatatttcccaagctacggtcattcagggaccaccaacagaagtttgcctgtatccacaaaccacttgtcctgttattttctttaataygtgtcttgtttaattggcttacatattgacctagtatatttgtttgataaggaaactctgttaactactgacttacatattttctaattacaccaaaatc

SEQ ID NO: 54385 - DNA, 201 bp, Homo sapiens
ctcggcttctgtccggctgcggttggcaatctcctcatactgggccttgacctcagcgatgatgctatccaggtccaggttgcggttgttgtccatggagrggaccactgaggtgtcagagacatgcgtctgcatctgggacagctcctgcagggagatttggagtcggtcatctggttctgtgttgtgttatttaatgtc

SEQ ID NO: 54386 - DNA, 201 bp, Homo sapiens
tgccactaacgcaagcccagtatggcattgctggcctctccagcggtgccccttcagccctctttcacatttatatgagtcaaatatttcccaagctacgstcattcagggaccaccaacagaagtttgcctgtatccacaaaccacttgtcctgttattttctttaatacgtgtcttgtttaattggcttacatattgac

SEQ ID NO: 54387 - DNA, 201 bp, Homo sapiens
tccctgttcctattcatcttgctctgaagcagaattggcctttaaccagcctgggaagcatctctcttcagcacgtggctgggccctaagtgacaccggcygcctggtcgcagacatgctcctccacctgcctctgaaagcagagtggctgtgtctcccttccacctccccttcctggagcaccacagttgcactgtgctt

SEQ ID NO: 54388 - DNA, 201 bp, Homo sapiens
ccaaggcctccagcgccatggattacctgcctcggtcaggttctagagcccagcttggccttgggctgggcagcaagttggctccaggcttccttcctatmtgctcaggtccagcctgcagttgttttccatggacaagaatcctaagatggctgaggcgggccgtttccaaaaccctcctgagggctgagggcaggagct

SEQ ID NO: 54389 - DNA, 201 bp, Homo sapiens
aagccccaagccctacccaggaagaaattctgggggtaccactagggtcatcaatgccacaatgccccctgcaagatgtagctgcgagctctctgggtctrtgaggcccaaatgctctccatctctacccatcagccttcccaggcagggctgtgccaaggagtgaacaaaagctccattcaccatgaccctctccccgcc

SEQ ID NO: 54390 - DNA, 201 bp, Homo sapiens
tgcaaaccagctttgacacagacctgccatgccaccgcccctcctaaccagatcgccacctctaagccccaagccctacccaggaagaaattctgggggtrccactagggtcatcaatgccacaatgccccctgcaagatgtagctgcgagctctctgggtctgtgaggcccaaatgctctccatctctacccatcagcct

SEQ ID NO: 54391 - DNA, 201 bp, Homo sapiens
cttgtcgatgaaggaggcaaacttattgttgagggtcttgatctgctcgcgctcctcggtcctcaccctctggatgctggggtcgatttgcaggttgaggrgagtcaggagactctggttgacagtgacctcttggatacctccaggagggcagacaggaaagccagggccaccgaagccacctccaaagccagctccgcc

SEQ ID NO: 54392 - DNA, 201 bp, Homo sapiens
ttttatttagttcaaaatatttaaaaatgtatgttcagatttcttccttgacccatgtgttattcagaagtttgttgtttaatctccatgtatttggggatttttttttttttttttgagatggtctcactctgttgcccaggctggagtgcagtggcgtgatctcggttcactgcaacctctgcctcctaggttcaagca

SEQ ID NO: 54393 - DNA, 201 bp, Homo sapiens
ccatcttcccaaggccccatagccttcttagttggcagagaactgtggcaccctttgtgtagaatcttgacagagtctactgattgaggagaagaggggcmtgccacataggtttatctcatcatgacctcagcagggagcacaatctaaagacaaagtatttgatctgaaaatagctttgggctgctcagcaactctgtc

SEQ ID NO: 54394 - DNA, 201 bp, Homo sapiens
cttgctctttaaatcagagctgaggttttctaccctttgtttcccctctgtgctgatacctgttccactgagctcccattgatcaccatcaaaagatcaayggtcattatcacacagacatgcaaacatccttctcatgcttccatcttattacagatacatgagtctgctgtaattctgagatgaaaatgacatatgcca

SEQ ID NO: 54395 - DNA, 201 bp, Homo sapiens
aactgcccctctccacaccgacaactcaccatgctccacaccctactctgtcagtcagtgattctggaggacactctgggtggacgatcaccaatgttgtrtaagccccaaaagctgttaggacaagttcccggtgtgccaggcaaagtctgttctctttccccagctgaaaagctccaggacagcaggctactggcagga

SEQ ID NO: 54396 - DNA, 201 bp, Homo sapiens
aggtgggtggatcatgaggtcaggagatcgagaccatcctggctaacatggtgaaaccccatctctaataaaaatacaaaaaattagccgggcgtggtggygggtgcctatagtgccagctacttgggaggctgaggcaggagaatggcttgaacctgggaggcggagcttgcagtgagccgagatggtgccactgcactc

SEQ ID NO: 54397 - DNA, 201 bp, Homo sapiens
tctgtaattgcttctttaactctccagttggaaggcagtggtttgccctgtaatcttagttctctgacagatgaagaagagttgttgcttttcattttttycattttttactttttgttagaatgtagtgatgactttcaacctcctgaagtgccagaccccaaactaaaagtccctctagtctctcttgctctttaaatc

SEQ ID NO: 54398 - DNA, 201 bp, Homo sapiens
aatatttatatatattcaaaattttgcggggttgtggcttactgttttgctctcttcatgttgttttatgaacaaagtttatcaattttttaaggtaagcttttttctatcccatttaagaaatttttgcctatcctcactccataaagatatcttctgttttcttctgaatgaattattgttttacctttcacatacagg

SEQ ID NO: 54399 - DNA, 201 bp, Homo sapiens
tgaggtcaggagatcgagaccatcctggctaacatggtgaaaccccatctctaataaaaatacaaaaaattagccgggcgtggtggtgggtgcctatagtsccagctacttgggaggctgaggcaggagaatggcttgaacctgggaggcggagcttgcagtgagccgagatggtgccactgcactccatcctgggcaaca

SEQ ID NO: 54400 - DNA, 201 bp, Homo sapiens
cccatcaaagatagctctgaagcaagaccaaggggtgcctacatcacagagaggggagtctgtgccagtgaatggtgtccagagcactggggacacagctmtgcggctctgcaggtttcttgtaatcgccatcatcgcaaacaccttgtgcagcctgcagcaattctgccatgaacaccacacacaaaaaacactacacca

SEQ ID NO: 54401 - DNA, 201 bp, Homo sapiens
ggcctgagacataccaggggaccctcggctcctgatagaacagaacagatccaagcctgaagcaagtgtctgaggactcgtagtgggatgctcccgctccwctcaaagatcgatatcggggtatatccccaccaccacatacactcacaggtcccgggtacagacctcactgccctcagggaagccccacccctcctgaga

SEQ ID NO: 54402 - DNA, 201 bp, Homo sapiens
tacactggtctagggcacaagaagaaggaggaggagacaagtactcccgctgctgggaaatcgatttaggactagagtccccagtgaacccctaaaaattrcccacagtttctagggtaggtattattgtatctaataatagtaatcatttattgctatagctaacatttattgagctcttactatgggcctgggatttta

SEQ ID NO: 54403 - DNA, 201 bp, Homo sapiens
agccctcggccactgcttgcactgaagccagagccccccacactgagcccaccacctaggccgacacccccactgctgctggagtagtagcttccactgcyacctccggcaagacctccaccgaggccgccgccaagacctccaccgaggccaccgccatagccactgccactgccatatccagaggaaacactgcttgtg

SEQ ID NO: 54404 - DNA, 201 bp, Homo sapiens
ccaactcctccctgtccccattgcttcctgtgggtcccacacctcctgcattgctctagccacctctggaccagggcttcaaggaaggcaaaagtggagcygagtcctaggcactgtccagacacccccaacactgagaggatccacctccacggcctggaagtgacaacaggccacagcctctgcgggcagcatgcagta

SEQ ID NO: 54405 - DNA, 201 bp, Homo sapiens
ccgaggccaccgccatagccactgccactgccatatccagaggaaacactgcttgtgacaacagctgcagggaaaggagggaggactcagtgagaccatcwgccaggctgatcctgcatggcccatttatttgatctgctggtgttggagcactctactggaccccctttacagagtagcaaacaaggcccggaagaactg

SEQ ID NO: 54406 - DNA, 201 bp, Homo sapiens
gcagcccctggtggttccctctctgggctgctgtatctggcttggactgctgcaggcaccctccagttgggtgtcctgaggaccggctcctgtcagtgtcygcagggaaagcctggagtcaaagccccatggggaggagagataggccatcagctcatgctgagtgcaaatgggtgccaggcatgtgctgggaatatgaag

SEQ ID NO: 54407 - DNA, 201 bp, Homo sapiens
aagcccatctggtaccaagaagacaccaccctcccctgtgtccaccctccaccccaactcacttgttcttgaagtcttccaccaggtcctgcatgtttctyagctctgagtccaggcggccccgttcccccacgatgctgtccagctgcctcctgaggttgttgatgtactgctcgaacaacggctccaggttctgcctca

SEQ ID NO: 54408 - DNA, 201 bp, Homo sapiens
gctctgagtccaggcggccccgttcccccacgatgctgtccagctgcctcctgaggttgttgatgtactgctcgaacaacggctccaggttctgcctcacrgtcttggtgccctgctcctgcagcagggtccacttggtgtccagaaccttgttctgctgctccaggaaccgcacctggaggggagcagggtttgaagata

SEQ ID NO: 54409 - DNA, 201 bp, Homo sapiens
gataccaggactcggcttctgtccggctgcggttggcaatctcctcatactgggccttgacctcagcgatgatgctatccaggtccaggttgcggttgttktccatggagaggaccactgaggtgtcagagacatgcgtctgcatctgggacagctcctgcagggagatttggagtcggtcatctggttctgtgttgtgtt

SEQ ID NO: 54410 - DNA, 201 bp, Homo sapiens
tgatctcatgtatgtgtgttgtacaccccacagtagagcagcttcgctttatcagctgaaggccatcttgagttcatgctgtctactcacctgcattcctmgccctccagcagcttgcggtaagtggcgatctccacgtccagggccagcttggtgttcatgagctcctggtactcacgcagcagccgggccatgtcctgc

SEQ ID NO: 54411 - DNA, 201 bp, Homo sapiens
cttcctggggcagtccttccagatgcatgagacgtggctaacaactgctgatacttcctaataccttgggagtagcccagtgtcttggcccaagcttcagygattcgctctattcctcccctctccaaaccccacaaccgcttatggccaagacactcaaacagggccctgcaacactttgttcaggatgagcagaggcca

SEQ ID NO: 54412 - DNA, 201 bp, Homo sapiens
ttcagcagaggcctcaacctccggatagtctgtgaaggcagcaaacagagagggccccagataccactcagcagtcagtataccataacatcttccagcarccccaagagagagggacccctgccctggagtatagacaggggaggtgcccttggagaccccctcccttctctgaactgccagaacccagggcaggaccac

SEQ ID NO: 54413 - DNA, 201 bp, Homo sapiens
tctgaagaggatgacttcagcagaggcctcaacctccggatagtctgtgaaggcagcaaacagagagggccccagataccactcagcagtcagtataccayaacatcttccagcagccccaagagagagggacccctgccctggagtatagacaggggaggtgcccttggagaccccctcccttctctgaactgccagaac

SEQ ID NO: 54414 - DNA, 201 bp, Homo sapiens
ccagtcccaccgtctatgtgagactgtgaccctgtgtccttccccatttcctccctcagactccaggacacactcgcagctcccatcttcatgttccgtgrgcacatgtgaacactgacctgctcactgtccacttggaccaacgatcactgttgagggtttgtgaaaacaggttaaggcttcttccaagggagacgcagt

SEQ ID NO: 54415 - DNA, 201 bp, Homo sapiens
tcagaggatgagcaacaggtaaggggtctttattatgcagtcaactgtaagcctacttttgcagtgggaaggggcttctcctcataggcagagagggaggrgacactggtagcatgaacctctggccaaggtccctccccatttaaatactgctttctctgtaactgcctaccatataataattctattattgctctaatt

SEQ ID NO: 54416 - DNA, 201 bp, Homo sapiens
gctggagctgttgcctctcccagggccaccctcaggaaatgcactcggcatctgcacagtcctcaaggccatgggacaccttgctggccccagtcccaccrtctatgtgagactgtgaccctgtgtccttccccatttcctccctcagactccaggacacactcgcagctcccatcttcatgttccgtgagcacatgtgaa

SEQ ID NO: 54417 - DNA, 201 bp, Homo sapiens
gacctctctcgcagagctgtgcagggaatgtaggacctggtcagcatttcatacatggagaagcccttcacagacaccagggagagggtggtatccattcrtggaacaagggttaggcaaatcctgccatcccagcccaggattccttctcctcagagcctccactccaatctgtagggctttagtagaagatacatttaa

SEQ ID NO: 54418 - DNA, 201 bp, Homo sapiens
gcccctccctcaatgccagacctggacaggtataaataatggagccgctcctggtggggagccaggcaccagcaccactgcagctcgggagagtcccaccycagcctggaatttcactgtggcaggaagggagggattgtgttaggctcaccagggagctttcctgctgggcaccccacagaggcagttcccaggcttggt

SEQ ID NO: 54419 - DNA, 201 bp, Homo sapiens
ccacatacactcacaggtcccgggtacagacctcactgccctcagggaagccccacccctcctgagacactgggacattctcttctccccattcattctcytcccagctgtgttgtgaagaaagaggacttggcagagcaggaatgcgttctggctagtctgaggattgctagagtgtgccaagctcagatccatgtgcca

SEQ ID NO: 54420 - DNA, 201 bp, Homo sapiens
ctgctcgcgctcctcggtcctcaccctctggatgctggggtcgatttgcaggttgaggggagtcaggagactctggttgacagtgacctcttggatacctycaggagggcagacaggaaagccagggccaccgaagccacctccaaagccagctccgccaccgagcccaaagccaccaccagctccaccgccgaaaccaaa

SEQ ID NO: 54421 - DNA, 201 bp, Homo sapiens
tccgtgtctacaggatgagtctgttgtccccttcacactgggtatgctctgtgtttaggatttaggatttaatctagcatttaggattctttattccttaggcttccctccatccttcttcttccctcacccttattctgagggtgttctgcatctgagcccactaacaagtagcctgcacgtgccaccccagcccccagg

SEQ ID NO: 54422 - DNA, 201 bp, Homo sapiens
ggttcctgtggagatttctgctcatgggttactactctggtaagttgggattctctgtaattgcttctttaactctccagttggaaggcagtggtttgccmtgtaatcttagttctctgacagatgaagaagagttgttgcttttcattttttccattttttactttttgttagaatgtagtgatgactttcaacctcctg

SEQ ID NO: 54423 - DNA, 201 bp, Homo sapiens
tgtacaactataaaagtatttgcacaaagccaaaacatcttccttctttctctctctttggcatttatttcagacccacagtgattttttacaaaagatcrtagctcaccttgtcgatgaaggaggcaaacttattgttgagggtcttgatctgctcgcgctcctcggtcctcaccctctggatgctggggtcgatttgca

SEQ ID NO: 54424 - DNA, 201 bp, Homo sapiens
cttcatagaatgagtcagaaaatgttctctgtgttcctatctttggaaagagattatagagaattggtacaatttctcctgtcaatgtttggtagaatccrcctgtgaacccatccaggcctggatgggtaaataaataacttttggaaagttatttactattggttcaatttctttagtctattttttcttgtgtgaatt

SEQ ID NO: 54425 - DNA, 201 bp, Homo sapiens
caacactcaaacttatccacacggagcctccggcaatttaccaattatggctcagggttttctacccaaatactggttcctgtggagatttctgctcatgkgttactactctggtaagttgggattctctgtaattgcttctttaactctccagttggaaggcagtggtttgccctgtaatcttagttctctgacagatga

SEQ ID NO: 54426 - DNA, 201 bp, Homo sapiens
ctttgtcttgttttggtattaaggtgatgctggcttcatagaatgagtcagaaaatgttctctgtgttcctatctttggaaagagattatagagaattggyacaatttctcctgtcaatgtttggtagaatccacctgtgaacccatccaggcctggatgggtaaataaataacttttggaaagttatttactattggttc

SEQ ID NO: 54427 - DNA, 201 bp, Homo sapiens
ctatctgctttcattacccatctgttcttgcatgttgtgtaccttgttcatttgtgctcttagcttgttaatcatggttgttttaaattcccgatctaatwattccaatatccctgccatatctgagtgtggttctggtacttgctctgtcttttcaaactgttttctaccttgaagtatgctttgtaatttttttgttga

SEQ ID NO: 54428 - DNA, 201 bp, Homo sapiens
tttttggaggtgctaatatacgtagtatcatgttttttatttcaaattcctattgttctttgctagtacattggaaagtgattgactttttatattagccytgtatcatgcaactttgctataatcacttgtaagtttgggtagtttttcattgcatctttttttctacatagacagttatgtcatgtgatcaaagtttta

SEQ ID NO: 54429 - DNA, 201 bp, Homo sapiens
ttctgcctcacagtcttggtgccctgctcctgcagcagggtccacttggtgtccagaaccttgttctgctgctccaggaaccgcacctggaggggagcagrgtttgaagatagagaaacttggatttcatgttctatgatcaactcactaaggtgcctcccacctctttccgtccctctaaagcttttctgtgcactgtgc

SEQ ID NO: 54430 - DNA, 201 bp, Homo sapiens
cttgagcaaaatggtttgggtggcctccctggctggagcatttctgagaccctcagagatgaattgtgctgagctcaccattttcacatttggttgctttytggagaacagatgtgagtgtcctggaggcctgagacataccaggggaccctcggctcctgatagaacagaacagatccaagcctgaagcaagtgtctgag

SEQ ID NO: 54431 - DNA, 201 bp, Homo sapiens
ccaccactagtgctgatggatatcctcttggagccccccaggttgtagaggctccggctgccatagccacccactccacaagcacccgcaaggctgaccckgccgaagccaccaccaccgccacccccggaccgggacacggaggtgaagctggtgcgggagacagacggggtgatggcagaggcggtgctgaagctacga

SEQ ID NO: 54432 - DNA, 201 bp, Homo sapiens
tgccctttgaccttttccttgctctttggcctgggcaggactctgtggggggtttaggaaacccggggatcccatgcaatcccttaaaaaaaaaccctgasactcatgggctatagcgtctctctttgggggtagctactctgccggttccccagccccccaggtgtgttccagcaagctctattccactagggaagaaat

SEQ ID NO: 54433 - DNA, 201 bp, Homo sapiens
gccccccaggttgtagaggctccggctgccatagccacccactccacaagcacccgcaaggctgaccctgccgaagccaccaccaccgccacccccggacygggacacggaggtgaagctggtgcgggagacagacggggtgatggcagaggcggtgctgaagctacgactgcccccgctccggaaggacacacttgactg

SEQ ID NO: 54434 - DNA, 201 bp, Homo sapiens
ctggtgtgagattcagagtgagattatttctcaggtccttgggtttagatggaaattgtctacacagccattcctataaagcatcccaatgggcttcagcrggttccaggagccccattcttagtgtcgtcatggcctagaatcctagacatgggtgtgtcccctcactcaggagacagtcatcagagcacccaccttggt

SEQ ID NO: 54435 - DNA, 201 bp, Homo sapiens
cttgaacctgggaggcggagcttgcagtgagccgagatggtgccactgcactccatcctgggcaacagagcgagcctccgtctcaaaaaaaaaaaaaaaaraagacttgtagattttattattatttgtaaactgtatgctacatatctaatatagcagtaaaacttctagtaaacttataacataaacataaatacacat

SEQ ID NO: 54436 - DNA, 201 bp, Homo sapiens
caccaccgccacccccggaccgggacacggaggtgaagctggtgcgggagacagacggggtgatggcagaggcggtgctgaagctacgactgcccccgctycggaaggacacacttgactggcgagacatggtggcttgttcctggtggagcaagagaaccaggcactagtgggttgggaggtgctggagagaacagagct

SEQ ID NO: 54437 - DNA, 201 bp, Homo sapiens
tgaacctgggaggcggagcttgcagtgagccgagatggtgccactgcactccatcctgggcaacagagcgagcctccgtctcaaaaaaaaaaaaaaaaaamgacttgtagattttattattatttgtaaactgtatgctacatatctaatatagcagtaaaacttctagtaaacttataacataaacataaatacacattt

SEQ ID NO: 54438 - DNA, 201 bp, Homo sapiens
tcaggagactctggttgacagtgacctcttggatacctccaggagggcagacaggaaagccagggccaccgaagccacctccaaagccagctccgccaccragcccaaagccaccaccagctccaccgccgaaaccaaatccactaccggcaccacctccaaagccatagccgcctccagcaccagcaccaaaccggttcc

SEQ ID NO: 54439 - DNA, 201 bp, Homo sapiens
gaacctgggaggcggagcttgcagtgagccgagatggtgccactgcactccatcctgggcaacagagcgagcctccgtctcaaaaaaaaaaaaaaaaaaakacttgtagattttattattatttgtaaactgtatgctacatatctaatatagcagtaaaacttctagtaaacttataacataaacataaatacacattta

SEQ ID NO: 54440 - DNA, 201 bp, Homo sapiens
gattgacctagaaacaagttgttaggaaagaattataattcacattcttctccacccactatggggaaagtataagagatttggaaaatgtgattatgtckaaagcagtttttgccttgtaggagttacattctgtgagagaacttggcacggacagaaattcctccaacagaaagtaggcaatgggcaatgtcagaggtt

SEQ ID NO: 54441 - DNA, 201 bp, Homo sapiens
gtttcatccttttctgcacaatttttttcttagggaaggcacagctatcccagagcccactgggcagatctgcctgcaaggtttaggccagagaatgtggraagccctcagcgccccctataaaccactttgacctctttaaggccaggtttatccttccatagctcctcctaactcagcattttttctgccctttgacct

SEQ ID NO: 54442 - DNA, 201 bp, Homo sapiens
cgccacctcggcaagacgcccaggtgccatgggaacctgctgctctcctcagccccagaggtgtcctgagggtgccaacctccatgtctacagccggcttracccccagcagcccctggtggttccctctctgggctgctgtatctggcttggactgctgcaggcaccctccagttgggtgtcctgaggaccggctcctgt

SEQ ID NO: 54443 - DNA, 201 bp, Homo sapiens
ccagctgcctcctgaggttgttgatgtactgctcgaacaacggctccaggttctgcctcacagtcttggtgccctgctcctgcagcagggtccacttggtktccagaaccttgttctgctgctccaggaaccgcacctggaggggagcagggtttgaagatagagaaacttggatttcatgttctatgatcaactcactaa

SEQ ID NO: 54444 - DNA, 201 bp, Homo sapiens
tgtccagctgcctcctgaggttgttgatgtactgctcgaacaacggctccaggttctgcctcacagtcttggtgccctgctcctgcagcagggtccacttkgtgtccagaaccttgttctgctgctccaggaaccgcacctggaggggagcagggtttgaagatagagaaacttggatttcatgttctatgatcaactcac

SEQ ID NO: 54445 - DNA, 201 bp, Homo sapiens
ttgtcaaggaccagttaactatatttgtgtgggtctagttctggccttcctatcatgttccattgacctatttgtcaactcgttcaccaacacaacatggyctttattactgtagttcattgtaagtcttgaagttaagtattgacagtactctgactttgttcttcaatattgtgttgggccattttagatcttttgctt

SEQ ID NO: 54446 - DNA, 201 bp, Homo sapiens
gttgaggtgtgagtcaccctattcattgggctatggttggcagccccatcagggagcctgcagccagattcgcaggatggggaagggcagatggaacagcrggccagcccaagatagctcttcacaaagccctagcctcagggggaattgagggaagaattttcctgcctccacccaaagccagcggaatcttgcccccat

SEQ ID NO: 54447 - DNA, 201 bp, Homo sapiens
agctcttaaatgcatctgactttctccaggagtacagatatgatttacattgctgaatcctcctccaaagagatgcatttgatacacgcgttcaggacatrtagataccaaggagctcagaaaaaaagggtttgccgttgtcccacaggtcatgcaaagtcctgccacattaaatttcagaaattatttggtaaaccaaga

SEQ ID NO: 54448 - DNA, 201 bp, Homo sapiens
tttgtcaaggaccagttaactatatttgtgtgggtctagttctggccttcctatcatgttccattgacctatttgtcaactcgttcaccaacacaacatgktctttattactgtagttcattgtaagtcttgaagttaagtattgacagtactctgactttgttcttcaatattgtgttgggccattttagatcttttgct

SEQ ID NO: 54449 - DNA, 201 bp, Homo sapiens
gagtcaccctattcattgggctatggttggcagccccatcagggagcctgcagccagattcgcaggatggggaagggcagatggaacagcgggccagcccmagatagctcttcacaaagccctagcctcagggggaattgagggaagaattttcctgcctccacccaaagccagcggaatcttgcccccatcccaacctgg

SEQ ID NO: 54450 - DNA, 201 bp, Homo sapiens
tttaaggagtgaagcccattaaacaggatctatttagagaagggttgtttatatccattatttttccatcaacaacctaatttggcctatttttaaacttsggaaaaatgaatggtgcctcacagtggattaccacaaccataatgtcatggtcatgcctactaaggctccatacccaatattactgaaattattgactta

SEQ ID NO: 54451 - DNA, 201 bp, Homo sapiens
ctcatattgctgttgtttctttgtcaaggaccagttaactatatttgtgtgggtctagttctggccttcctatcatgttccattgacctatttgtcaactmgttcaccaacacaacatggtctttattactgtagttcattgtaagtcttgaagttaagtattgacagtactctgactttgttcttcaatattgtgttggg

SEQ ID NO: 54452 - DNA, 201 bp, Homo sapiens
tctgcagagctggacacaccaccccctccctcctacagcccaatgtctctagggctttcagaccccagtctgaaaaccggactaggtagaaaggcaaatgyccagacataaagcaactgctcagccttggctcagagggcctttggaggtgagtccctgctgccattattgaggtcatagtgacaagttaccccctggagt

SEQ ID NO: 54453 - DNA, 201 bp, Homo sapiens
atttcttgattccagcataaactgggactgatgctaagctaaggggaatggctcttaccccgtgactactggttgtgtgtctcaagcgggtgccggccctmattctacggagttttcagggaaaagactgatatgtggtcccttctggtggtcactcatgtggaagaagagcagttactacgtggcatgctgaagccacgc

SEQ ID NO: 54454 - DNA, 201 bp, Homo sapiens
gtgttgtatcttaaaagtcatcaccatacccaaggtcatctaggttttctcctatgttatcttctaggagtttcatagctttgcattttacatttagggcwatgatccattttgagttaattttgtggaaagtgtaaagtttgtgttgagattcatttgcatgtggggtattcaattatttcaatagcatttgtctttgct

SEQ ID NO: 54455 - DNA, 201 bp, Homo sapiens
atttccacaaaaaatctgtgaaaatttgattgaaattgcattaaacccatagttcaatttggagaaattgatgtatttacaatattaagttttccaatccrtgaagatatcatatacctttgtttattaggtcttctttaatattttcaaaaggatcattttagttttttgtcttacacatctttggttaagtttatttct

SEQ ID NO: 54456 - DNA, 201 bp, Homo sapiens
ttggtctgataccaggactcggcttctgtccggctgcggttggcaatctcctcatactgggccttgacctcagcgatgatgctatccaggtccaggttgcrgttgttgtccatggagaggaccactgaggtgtcagagacatgcgtctgcatctgggacagctcctgcagggagatttggagtcggtcatctggttctgtg

SEQ ID NO: 54457 - DNA, 201 bp, Homo sapiens
cttaccgttaattttaagagttatctaatacattgtagtttgaataagagtcctttatcagatatgtcttttgctaatattttcttccagtctgtggcttsccttctcattttggcagtgtgttttgcagagcagattttaattttaatgaggtccagcttatcaattattcctttcatggatcatggctttggtgttgta

SEQ ID NO: 54458 - DNA, 201 bp, Homo sapiens
tttcaccagcacctggcattgtcagtgttctggattttggctattctaataggcatgttgtgatacttcattattgttttaatttgtatttctctgatgasctatgatgttgaaaatctttcatatgcttacttactatttgtattatcttcattggtgatgtgtctgttaaagaatttggtccattttataatcaggtcg

SEQ ID NO: 54459 - DNA, 201 bp, Homo sapiens
ccactcttttttcatcttttgtggttttaactgagcattttatgattccattttctctcctttttagtatatcggttatactttttttttttttttttacytctttcagtggttgccctagagtttgcaatatacatttacaactaatccaagtctactttcaaataacactatactgcttcatgggtattgcaagttctt

SEQ ID NO: 54460 - DNA, 201 bp, Homo sapiens
caggaacaccggtgggggaaaagagaccagaaaagtgagttgaggtcagctatatggccatgagtcagactgaaatagtgttgatgatgtgtcattatcaygcacaagtcactgatctcatgtatgtgtgttgtacaccccacagtagagcagcttcgctttatcagctgaaggccatcttgagttcatgctgtctactca

SEQ ID NO: 54461 - DNA, 201 bp, Homo sapiens
caccagctccaccgccgaaaccaaatccactaccggcaccacctccaaagccatagccgcctccagcaccagcaccaaaccggttcctgaagctgccaccwctagtgctgatggatatcctcttggagccccccaggttgtagaggctccggctgccatagccacccactccacaagcacccgcaaggctgaccctgccga

SEQ ID NO: 54462 - DNA, 201 bp, Homo sapiens
aaagaggaaagattctgtttatatgagaatgggaagaactttcccaaagttcacaggcagtgagtactaagtggtggcaaatagtgtggggctggttcagkcttttccaaggctgagctagtctagtgcctttgctctcctggagacactggtgtgagattcagagtgagattatttctcaggtccttgggtttagatgga

SEQ ID NO: 54463 - DNA, 201 bp, Homo sapiens
catcgtgggtggcaggacactgaaacactggtactggatctagctgcgtgtgtttagcaaaagtaaaacaaaataaaacaaagtaggtgtttcttttagarctcaggccccttccttgccctctttcaatctcaccctacctgtttcttgacattgtcaatctcggctctcagcctctggatcatccggttcatctcagag

SEQ ID NO: 54464 - DNA, 201 bp, Homo sapiens
ccgccaccgagcccaaagccaccaccagctccaccgccgaaaccaaatccactaccggcaccacctccaaagccatagccgcctccagcaccagcaccaamccggttcctgaagctgccaccactagtgctgatggatatcctcttggagccccccaggttgtagaggctccggctgccatagccacccactccacaagca

SEQ ID NO: 54465 - DNA, 201 bp, Homo sapiens
gagataggccatcagctcatgctgagtgcaaatgggtgccaggcatgtgctgggaatatgaaggtgaaggcaatccagtctctggtcactggcactaggakagttgccagaaaggaccagtaagtcctttctgtgggagtaactggaagagagaagggctctctcccaagtggcaattgtcaagcattgggccttcactgt

SEQ ID NO: 54466 - DNA, 201 bp, Homo sapiens
tactctgggtttgaagtgcaggacaagccatgggggcgaggctctgcagatggagagaaggagctgagcagtggccaaggctgggaggcctccgccacctmggcaagacgcccaggtgccatgggaacctgctgctctcctcagccccagaggtgtcctgagggtgccaacctccatgtctacagccggcttgacccccag

SEQ ID NO: 54467 - DNA, 201 bp, Homo sapiens
acgcccaccctccacaccccagttccacctcagtccaccacctcctccctctcccaactcctccctgtccccattgcttcctgtgggtcccacacctcctscattgctctagccacctctggaccagggcttcaaggaaggcaaaagtggagctgagtcctaggcactgtccagacacccccaacactgagaggatccacc

SEQ ID NO: 54468 - DNA, 201 bp, Homo sapiens
tgggagagaagggaggggcctgggctcattggaggggccatgcaagctggaattttaattttgagctggctggggctgagcaggaagggaggggcaggccygcagggggctgtggggagcagccttggcccccatcccttagattcagcagccgattggccctggcaggagagggtgcagagcagagccctccgcttccct

SEQ ID NO: 54469 - DNA, 201 bp, Homo sapiens
catcttaactgtgaagatgaacatgggagctaacattcatgtgggggctatgctggtttgttggttgcagccactggccagccatgggcataagagtttgkcaaaagccaactgaaagcattccatgagggtcacttggctgtatcaggtttataataaagagtattgtagggctgggcacggtggctcacgcctgtaatc

SEQ ID NO: 54470 - DNA, 201 bp, Homo sapiens
acataaatcccattttgatcgttgcaaaaaaaccacgtctcatttgaagacctccctgtgttcttatatctgactactgttgtggtagagcaaactgaaarggtttgcaaaagccgattgttaaattttgaagaacgttgtgagctgttattaaacatagccataattcaaattaaattatgtaaaattatagttaaatac

SEQ ID NO: 54471 - DNA, 201 bp, Homo sapiens
tcatgtatgtgtgttgtacaccccacagtagagcagcttcgctttatcagctgaaggccatcttgagttcatgctgtctactcacctgcattcctcgcccyccagcagcttgcggtaagtggcgatctccacgtccagggccagcttggtgttcatgagctcctggtactcacgcagcagccgggccatgtcctgcttggc

SEQ ID NO: 54472 - DNA, 201 bp, Homo sapiens
accattttaacttgcacatattattattactgtgatcatctgtgcttccttagaaccttaatacctctgagggccagaatcacattgtgttcattctgtakccaccctgtcctgcgccaaccctccagcatcatccctgtaccagatggtacctcaataagtgtctgttaagtttcactaaacataaatcccattttgatc

SEQ ID NO: 54473 - DNA, 201 bp, Homo sapiens
acaaagccaaaacatcttccttctttctctctctttggcatttatttcagacccacagtgattttttacaaaagatcgtagctcaccttgtcgatgaaggrggcaaacttattgttgagggtcttgatctgctcgcgctcctcggtcctcaccctctggatgctggggtcgatttgcaggttgaggggagtcaggagactc

SEQ ID NO: 54474 - DNA, 201 bp, Homo sapiens
ccccatctgtaaactgaagccctggcctagtagatctctagataaactctaacatcactcctacccctaaaactctggtacttaccccctttactcttccytctttattttgcattcagcccagggatctcatcttcccaaagcttctttcatgttcctgccccttttaccttcacagttcctgacattggagaaggcagt

SEQ ID NO: 54475 - DNA, 201 bp, Homo sapiens
atctgtatagagtcacgtggacctgatgctgccaccttctggctgcgtcacctggggcaagttatttaacgcctctaagcctcaggttccccatctgtaawctgaagccctggcctagtagatctctagataaactctaacatcactcctacccctaaaactctggtacttaccccctttactcttccctctttattttgc

SEQ ID NO: 54476 - DNA, 201 bp, Homo sapiens
ccatttaaagttattattgatatagttggattaatatctaccatatttcttactgttttctagttattgctcttgtttttcgttccttttttgtctcccaytcttttttcatcttttgtggttttaactgagcattttatgattccattttctctcctttttagtatatcggttatactttttttttttttttttacttct

SEQ ID NO: 54477 - DNA, 201 bp, Homo sapiens
tcattaggtaatgcccctctttcttactgataattttccttgctatgaagtctgtcctgtcccaaattaatacagctacttcagctttcttttaattagcrttagcatggtatgtcttttctccatccctttacttttaatcatatatgtctttatatttaaaaatgggtttgttttagacagcatactgttgggttttgt

SEQ ID NO: 54478 - DNA, 201 bp, Homo sapiens
caccaccagctccaccgccgaaaccaaatccactaccggcaccacctccaaagccatagccgcctccagcaccagcaccaaaccggttcctgaagctgccwccactagtgctgatggatatcctcttggagccccccaggttgtagaggctccggctgccatagccacccactccacaagcacccgcaaggctgaccctgc

SEQ ID NO: 54479 - DNA, 201 bp, Homo sapiens
aagcacgtacatattacggatagttatatcttggaattaaggattattattgacacctttatcattaggtaatgcccctctttcttactgataattttccytgctatgaagtctgtcctgtcccaaattaatacagctacttcagctttcttttaattagcattagcatggtatgtcttttctccatccctttacttttaa

SEQ ID NO: 54480 - DNA, 201 bp, Homo sapiens
gctccaggaaccgcacctggaggggagcagggtttgaagatagagaaacttggatttcatgttctatgatcaactcactaaggtgcctcccacctctttcygtccctctaaagcttttctgtgcactgtgcctggccctgggccccaggaggggaggtgcagactgaggcacccaaactcacttttccagggggagatagg

SEQ ID NO: 54481 - DNA, 201 bp, Homo sapiens
aattagccgggcatggtggcgcatgcctttaatcccagctcctgggaaggctgaggcaggagaatcacttgaacctgggaggaggaggttgtggtgagccmagcttgcgccattactctccagcctgggcaacaatagcaaaactctgtaggaaaaaaaaaaaaaacaaaaaaccagagtgcttactaactagagtcctgt

SEQ ID NO: 54482 - DNA, 201 bp, Homo sapiens
agccgggcatggtggcgcatgcctttaatcccagctcctgggaaggctgaggcaggagaatcacttgaacctgggaggaggaggttgtggtgagccaagcytgcgccattactctccagcctgggcaacaatagcaaaactctgtaggaaaaaaaaaaaaaacaaaaaaccagagtgcttactaactagagtcctgtaaaa

SEQ ID NO: 54483 - DNA, 201 bp, Homo sapiens
tgatcctgcatggcccatttatttgatctgctggtgttggagcactctactggaccccctttacagagtagcaaacaaggcccggaagaactgtcatttarttaaggtccctaaaaaagtgggtgagtgtaagaggcaaggtgctaggtactgagaggagctaggtactgaggggagctaggtactacagggagctaggta

SEQ ID NO: 54484 - DNA, 201 bp, Homo sapiens
gcccttgtgagctaacctctgaatgggaagaaataattctcccttcccagctgccagtctaattcagaacgtgtccacaaatccagggcacagaaacaaayggaaacacagaactgtacaactataaaagtatttgcacaaagccaaaacatcttccttctttctctctctttggcatttatttcagacccacagtgattt

SEQ ID NO: 54485 - DNA, 201 bp, Homo sapiens
gcagccccatcagggagcctgcagccagattcgcaggatggggaagggcagatggaacagcgggccagcccaagatagctcttcacaaagccctagcctcrgggggaattgagggaagaattttcctgcctccacccaaagccagcggaatcttgcccccatcccaacctgggtcccagctctggtcctagctagattctc

SEQ ID NO: 54486 - DNA, 201 bp, Homo sapiens
acctgggaggcggagcttgcagtgagccgagatggtgccactgcactccatcctgggcaacagagcgagcctccgtctcaaaaaaaaaaaaaaaaaaagacttgtagattttattattatttgtaaactgtatgctacatatctaatatagcagtaaaacttctagtaaacttataacataaacataaatacacatttaca

SEQ ID NO: 54487 - DNA, 201 bp, Homo sapiens
ttgttccactatagataagttgtttcccccccaaccatggcttctttcaggatttttgttatctttcattttctacagtttgaatataatatacacaggtwtttttttatgtctgacactaatttttggaaattctcagtcattactttctccaatatttattatgttgctttctctatttcttgttctagtattcctttt

SEQ ID NO: 54488 - DNA, 201 bp, Homo sapiens
ccttccacctcacgcttgttcagcacaaaaagtggggagcaatagttgaggtgtgagtcaccctattcattgggctatggttggcagccccatcagggagsctgcagccagattcgcaggatggggaagggcagatggaacagcgggccagcccaagatagctcttcacaaagccctagcctcagggggaattgagggaag

SEQ ID NO: 54489 - DNA, 201 bp, Homo sapiens
tactttaattagtcagagggactaaaaaaggatatacagcaaaatcctctgcgctttgctttctcatagagggtggttttattttttaaataaacacttaygtaggagtgaccatgtgccaggcactgccctgcacactttacatatatgaatctgaaactagagcatgcaaagaagggctcttagcacttcctcagcttg

SEQ ID NO: 54490 - DNA, 201 bp, Homo sapiens
cataaaaagcacacattgcatatatccttatctgtatagagtcacgtggacctgatgctgccaccttctggctgcgtcacctggggcaagttatttaacgyctctaagcctcaggttccccatctgtaaactgaagccctggcctagtagatctctagataaactctaacatcactcctacccctaaaactctggtactta

SEQ ID NO: 54491 - DNA, 201 bp, Homo sapiens
ataagttgttatatggaatagccacccgaaggtgtgagtttgggcataaaaagcacacattgcatatatccttatctgtatagagtcacgtggacctgatkctgccaccttctggctgcgtcacctggggcaagttatttaacgcctctaagcctcaggttccccatctgtaaactgaagccctggcctagtagatctcta

SEQ ID NO: 54492 - DNA, 201 bp, Homo sapiens
gccaaaacatcttccttctttctctctctttggcatttatttcagacccacagtgattttttacaaaagatcgtagctcaccttgtcgatgaaggaggcaracttattgttgagggtcttgatctgctcgcgctcctcggtcctcaccctctggatgctggggtcgatttgcaggttgaggggagtcaggagactctggtt

SEQ ID NO: 54493 - DNA, 201 bp, Homo sapiens
gcctcctgacagcagatgcaaagctgaggtacccaaacacctcgacctttctcaggggctcatgtaagcaaattgctttatcagctttatcagtttttatrttttccttacgcattttcatagaatttgccccatattccatgccattttctcaggacatccttttgagcatcctggacccaaccgtcttcatataagaag

SEQ ID NO: 54494 - DNA, 201 bp, Homo sapiens
ggcctcctgacagcagatgcaaagctgaggtacccaaacacctcgacctttctcaggggctcatgtaagcaaattgctttatcagctttatcagtttttaygttttccttacgcattttcatagaatttgccccatattccatgccattttctcaggacatccttttgagcatcctggacccaaccgtcttcatataagaa

SEQ ID NO: 54495 - DNA, 201 bp, Homo sapiens
aaacaaacaaaaaaatctggatcgagtgagggcagctggttcccatttggctcagctgtgatcctgaagtttctgtgttatggtgtagccttcatttctgsatcatcagtggatttctctaccgctttcactagcaccagctgtggactgcaattgtactctagtcaagtatggagggaataagaaatagttatggcagaa

SEQ ID NO: 54496 - DNA, 201 bp, Homo sapiens
gctttgtctcggagcatggaggggataggcctgcctgggctcccggcctgctgactgtgttctgcttgacaccaggccagctgggctaagcgttcagatgyaaagaggaagctgctggggcctcctgacagcagatgcaaagctgaggtacccaaacacctcgacctttctcaggggctcatgtaagcaaattgctttatc

SEQ ID NO: 54497 - DNA, 201 bp, Homo sapiens
gcctgacacacaggaaaccctcaattaactatagcgatgatcactattcccaccttcaaggtttatctctgtgtttatttcccattcccatttccttgacrggctctgcacctctcctttcctatcccgtcctcctgtcttttgacaccggaagcttggcctgggtacctggttctcccccagttggtgtcccaagtgtgg

SEQ ID NO: 54498 - DNA, 201 bp, Homo sapiens
tgctactccaggacttggacctgtgtcttcaggtgctggatctgggacaaaagagggagacagtaaaatttctctctccctaggtaggagagaatatggcyggccacttcaccctggtggccctaagcatgtttcatagtccctctggccctaaatttccttattaatataaattggttgggggggggttgctaataggat

SEQ ID NO: 54499 - DNA, 201 bp, Homo sapiens
tcccagacccttactgttggccccacacagagtacccctcctctctggaagccctaaggacccttgctactccaggacttggacctgtgtcttcaggtgcyggatctgggacaaaagagggagacagtaaaatttctctctccctaggtaggagagaatatggccggccacttcaccctggtggccctaagcatgtttcat

SEQ ID NO: 54500 - DNA, 201 bp, Homo sapiens
ccacctgtgataggtgctgcctacagagagatgctgggaaccactcttgccgccctctggcaagacctgggacaaatacctgaaaagcttctcaccctaaygcacttggcttctccctgggtcactgggtcactgggccccttgcttggttttgaccgtctctgcagttcctgcccagtcccaaaggctgactccagcttc

SEQ ID NO: 54501 - DNA, 201 bp, Homo sapiens
cctgggtgtgttggggaagggggagaaggctgtggtgccccaccctaccccaccccacctgtgataggtgctgcctacagagagatgctgggaaccactcytgccgccctctggcaagacctgggacaaatacctgaaaagcttctcaccctaatgcacttggcttctccctgggtcactgggtcactgggccccttgctt

SEQ ID NO: 54502 - DNA, 201 bp, Homo sapiens
gattttttacaaaagatcgtagctcaccttgtcgatgaaggaggcaaacttattgttgagggtcttgatctgctcgcgctcctcggtcctcaccctctggmtgctggggtcgatttgcaggttgaggggagtcaggagactctggttgacagtgacctcttggatacctccaggagggcagacaggaaagccagggccacc

SEQ ID NO: 54503 - DNA, 201 bp, Homo sapiens
cttcgctttatcagctgaaggccatcttgagttcatgctgtctactcacctgcattcctcgccctccagcagcttgcggtaagtggcgatctccacgtccrgggccagcttggtgttcatgagctcctggtactcacgcagcagccgggccatgtcctgcttggccttctgcagggcctcctccagctcggccagcttgtt

SEQ ID NO: 54504 - DNA, 201 bp, Homo sapiens
gtgttcttttttgagctttcagaggctttaaaaaaaaaaagaaaagaaacaaaattaaatctagcatcctagttgctggttcataagactaaagaaattayttgagccaccaagctgggttatgtcaccagctcctgctttgagacaaatctatccaaaggcccatgtaccggggaggaaagtcccagagagcaagcctta

SEQ ID NO: 54505 - DNA, 201 bp, Homo sapiens
gatatgatttacattgctgaatcctcctccaaagagatgcatttgatacacgcgttcaggacatatagataccaaggagctcagaaaaaaagggtttgccrttgtcccacaggtcatgcaaagtcctgccacattaaatttcagaaattatttggtaaaccaagagctactccatccctgacactgtcaaaaaatagctat

SEQ ID NO: 54506 - DNA, 201 bp, Homo sapiens
catgtatgtgtgttgtacaccccacagtagagcagcttcgctttatcagctgaaggccatcttgagttcatgctgtctactcacctgcattcctcgccctycagcagcttgcggtaagtggcgatctccacgtccagggccagcttggtgttcatgagctcctggtactcacgcagcagccgggccatgtcctgcttggcc

SEQ ID NO: 54507 - DNA, 201 bp, Homo sapiens
gcggtaagtggcgatctccacgtccagggccagcttggtgttcatgagctcctggtactcacgcagcagccgggccatgtcctgcttggccttctgcaggkcctcctccagctcggccagcttgttcctggcatccttgagggccagctccccacgctgctcggcatccgcaatggcgttctgcagattggcgcactacag

SEQ ID NO: 54508 - DNA, 201 bp, Homo sapiens
tgtgtttagcaaaagtaaaacaaaataaaacaaagtaggtgtttcttttagaactcaggccccttccttgccctctttcaatctcaccctacctgtttctygacattgtcaatctcggctctcagcctctggatcatccggttcatctcagagatctcatgcttggtgttgcggaggtcatcgccatgccggccagctgtc

SEQ ID NO: 54509 - DNA, 201 bp, Homo sapiens
atccgcaatggcgttctgcagattggcgcactacagatagaaaggaggagagtggggttgcttgggacctgaggtgtctccttctgagtttctgggtcagrcaaaccaaactatcatgaatcccagagagaaaccagtacatcgtgggtggcaggacactgaaacactggtactggatctagctgcgtgtgtttagcaaaa

SEQ ID NO: 54510 - DNA, 201 bp, Homo sapiens
ggcttctgtccggctgcggttggcaatctcctcatactgggccttgacctcagcgatgatgctatccaggtccaggttgcggttgttgtccatggagaggwccactgaggtgtcagagacatgcgtctgcatctgggacagctcctgcagggagatttggagtcggtcatctggttctgtgttgtgttatttaatgtcagt

SEQ ID NO: 54511 - DNA, 201 bp, Homo sapiens
ggccttgacctcagcgatgatgctatccaggtccaggttgcggttgttgtccatggagaggaccactgaggtgtcagagacatgcgtctgcatctgggacrgctcctgcagggagatttggagtcggtcatctggttctgtgttgtgttatttaatgtcagttccattcaaatctttcactcattgtgatatgacaacttg

SEQ ID NO: 54512 - DNA, 201 bp, Homo sapiens
tttggcatttatttcagacccacagtgattttttacaaaagatcgtagctcaccttgtcgatgaaggaggcaaacttattgttgagggtcttgatctgctygcgctcctcggtcctcaccctctggatgctggggtcgatttgcaggttgaggggagtcaggagactctggttgacagtgacctcttggatacctccagga

SEQ ID NO: 54513 - DNA, 201 bp, Homo sapiens
tatttcagacccacagtgattttttacaaaagatcgtagctcaccttgtcgatgaaggaggcaaacttattgttgagggtcttgatctgctcgcgctcctyggtcctcaccctctggatgctggggtcgatttgcaggttgaggggagtcaggagactctggttgacagtgacctcttggatacctccaggagggcagaca

SEQ ID NO: 54514 - DNA, 201 bp, Homo sapiens
catagctcctcctaactcagcattttttctgccctttgaccttttccttgctctttggcctgggcaggactctgtggggggtttaggaaacccggggatcscatgcaatcccttaaaaaaaaaccctgacactcatgggctatagcgtctctctttgggggtagctactctgccggttccccagccccccaggtgtgttcc

SEQ ID NO: 54515 - DNA, 201 bp, Homo sapiens
gggttgtggggccagggttcatgcctgggccgccttaaacctctgagtgtccagctgtgtgcctggatgaacacacacccctgatgcagagtcagggtggygtgggggaatctctgtaatgacaccatcgaggggctggaaaccacaaatgagcacttggaaagttgtactgcagtccttagagggtgagagggtgagtgt

SEQ ID NO: 54516 - DNA, 201 bp, Homo sapiens
caccagacccaccgtacagctgctggcggttctcacggccagcgtgttcttcgtcattgtgagttgaaatctgcctccctctaacatccacttccccatcrttgttccgctctgtggagtttcacagaagaggatcagaccctcttcctctttgacaagtatttctatgtttgtggacatttcttggtctcccttctccaa

SEQ ID NO: 54517 - DNA, 201 bp, Homo sapiens
cactgtgcttgccgggaggcaccagagaaatggagctcaccacatacgcaccagacccaccgtacagctgctggcggttctcacggccagcgtgttcttcktcattgtgagttgaaatctgcctccctctaacatccacttccccatcgttgttccgctctgtggagtttcacagaagaggatcagaccctcttcctcttt

SEQ ID NO: 54518 - DNA, 201 bp, Homo sapiens
ccatagctcctcctaactcagcattttttctgccctttgaccttttccttgctctttggcctgggcaggactctgtggggggtttaggaaacccggggatyccatgcaatcccttaaaaaaaaaccctgacactcatgggctatagcgtctctctttgggggtagctactctgccggttccccagccccccaggtgtgttc

SEQ ID NO: 54519 - DNA, 201 bp, Homo sapiens
aagtctctgattagaatagtggattcctctgtttctctaccccattattccattggtttttgcctcacatattttgatgctctgttgttaagcacgtacayattacggatagttatatcttggaattaaggattattattgacacctttatcattaggtaatgcccctctttcttactgataattttccttgctatgaagt

SEQ ID NO: 54520 - DNA, 201 bp, Homo sapiens
tggtcgcagacatgctcctccacctgcctctgaaagcagagtggctgtgtctcccttccacctccccttcctggagcaccacagttgcactgtgcttgccrggaggcaccagagaaatggagctcaccacatacgcaccagacccaccgtacagctgctggcggttctcacggccagcgtgttcttcgtcattgtgagttg

SEQ ID NO: 54521 - DNA, 201 bp, Homo sapiens
gctccaaatcagccccagcagctgatgtgaaatgctgtttgatgatggttgactcctaacgtctgactgtagtggtctggaggctctgggcctggctcagkgctccctcactgcacatctcttccagccaaagcatttacccagggacacctacgctgctcacaaacatgaaggatgctcaaaggtggtggccctgccacc

SEQ ID NO: 54522 - DNA, 201 bp, Homo sapiens
tggtgcatttagaccatcaccatttaaagttattattgatatagttggattaatatctaccatatttcttactgttttctagttattgctcttgtttttcrttccttttttgtctcccactcttttttcatcttttgtggttttaactgagcattttatgattccattttctctcctttttagtatatcggttatactttt

SEQ ID NO: 54523 - DNA, 201 bp, Homo sapiens
agccccaccttgtgagtcagtggggcaggtgcctcccaaggcctccagcgccatggattacctgcctcggtcaggttctagagcccagcttggccttgggstgggcagcaagttggctccaggcttccttcctatctgctcaggtccagcctgcagttgttttccatggacaagaatcctaagatggctgaggcgggccgt

SEQ ID NO: 54524 - DNA, 201 bp, Homo sapiens
tttgcttttcagttgagaaagaactgaaaaaacagttctattgacataccctcaagctcagattctaatgtcagctgtgtctagtctactaatgagcccamaaaaggcgttcgtcatttctgttataatgttttttatctctagcatttattttttattattagaatttctgtctatctgctttcattacccatctgttct

SEQ ID NO: 54525 - DNA, 201 bp, Homo sapiens
ctcatgctgagtgcaaatgggtgccaggcatgtgctgggaatatgaaggtgaaggcaatccagtctctggtcactggcactaggagagttgccagaaaggrccagtaagtcctttctgtgggagtaactggaagagagaagggctctctcccaagtggcaattgtcaagcattgggccttcactgtctgcacttgaggaaa

SEQ ID NO: 54526 - DNA, 201 bp, Homo sapiens
gcatgagattcttctcacattttctctgtgaggacctggtggagcccctggagtaaaactaagtatgcttctctaagagtgggctcccctggaattctcarcactcaaacttatccacacggagcctccggcaatttaccaattatggctcagggttttctacccaaatactggttcctgtggagatttctgctcatgggt

SEQ ID NO: 54527 - DNA, 201 bp, Homo sapiens
gagccccaccttgtgagtcagtggggcaggtgcctcccaaggcctccagcgccatggattacctgcctcggtcaggttctagagcccagcttggccttggsctgggcagcaagttggctccaggcttccttcctatctgctcaggtccagcctgcagttgttttccatggacaagaatcctaagatggctgaggcgggccg

SEQ ID NO: 54528 - DNA, 201 bp, Homo sapiens
ctgggctactgctttggatttctcctgtaaggggcagacaatagacaaggaccaagcttaagacccttcctccaaatcatccgcattaactaacccatagsttgcttagaagtcttgttcagtttctaaatatttttgaattgttgagatatatttcattactgctttctaatttaatatgccatgatcgtggaacatagt

SEQ ID NO: 54529 - DNA, 201 bp, Homo sapiens
ccctgagaaccaaggttagccccagtccttcggtgaagcagggccttcctttgcccaggaatgcacagtagcttcttattggccttatgctcaacaattcrttcttctgggtcccccttcctcatcatccctcctaccatctatgataggtggaataatgatccccaaagaagaccccatcttaatccccagaaactgtac

SEQ ID NO: 54530 - DNA, 201 bp, Homo sapiens
gaaatttttgcctatcctcactccataaagatatcttctgttttcttctgaatgaattattgttttacctttcacatacaggactataatacaactgaaawtgatttttatctatgggatgaagtagaaatcgtaatacatttttcccatatagacagccaactaaccttgcaccatttattgaaaagactatcctttttc

SEQ ID NO: 54531 - DNA, 201 bp, Homo sapiens
atgacctgtctaggcctctcgggcagctgacctgggcatccctgagggctgggccccctcactctggcgtcagtcatggcctcctgcaggttggcacgccrccctcagcaaagaacaataacacgttatggtctgcaagtcctcaggtacaacatggctccattgttctgagtctggaaaatgatctcactctcaccctga

SEQ ID NO: 54532 - DNA, 201 bp, Homo sapiens
ttggttttctgttcgtgcattagtttgctaaggataatggcttccagctccatccatgtccctgcaaaggacatgatttcgtttctttttatggctccatrgtattctgtggtgtatacgtatcacattttctttttccagtctatcattgatgggcatttgtgttggtttcatgtctttgctattgtgaatagtgctgca

SEQ ID NO: 54533 - DNA, 201 bp, Homo sapiens
ccaaaagcccttgtcatcaccattgtgggcacttggattttcagtgcaggacttgtgatttgactctgaagaggatgacttcagcagaggcctcaacctcyggatagtctgtgaaggcagcaaacagagagggccccagataccactcagcagtcagtataccataacatcttccagcagccccaagagagagggacccct

SEQ ID NO: 54534 - DNA, 201 bp, Homo sapiens
atgatttcgtttctttttatggctccatagtattctgtggtgtatacgtatcacattttctttttccagtctatcattgatgggcatttgtgttggtttcwtgtctttgctattgtgaatagtgctgcagtaaacatacacatgcatgtatctttataatagaataatttctattcctttgggtatatacccagtaatggg

SEQ ID NO: 54535 - DNA, 201 bp, Homo sapiens
caccagtctgcagacgctgatcacctctactccagtggctgatagtaaggagttagaattcacacatgactccctctgcccgtgcccagagcctcacagtrcttagctgggcctccagtcaaacccacatcctctgtaacagttgtcaaggactcccactatttcttgctcattcacaagtccctggtccccagggccttt

SEQ ID NO: 54536 - DNA, 201 bp, Homo sapiens
aatggttgaactaatttacattcccaccaacagtgtaaaagctgttcttcttttttagggttgttttgactattttagctccttttcatttcctgtcttakttcattttgtgctgctataatggaatagctgagtctgggtagtttaaaaaaccaaaaatttatttctcacagttccggaggctgggaagtccaggatcaa

SEQ ID NO: 54537 - DNA, 201 bp, Homo sapiens
gaggaaacagactccatagcgaacaaactatgactcctctcctcatctcccatagtcctgcaatcacagccccctctgtctttggatgccttcttcacccbgccccagccatgcagccccgcccccaggctccctcttgcacaaagcgctcctgctcaatgaagctgtccagttgcttgtagtgctgtcttgggccagtct

SEQ ID NO: 54538 - DNA, 201 bp, Homo sapiens
tttttgttcaatggaaaagtttcatttactattaagtataatattttttgtttttttgggcggccatttgatttatctccctttattctattcattttgtrtattacatgattttttaaacattaaaccatcttgactgcactgatgcttgactgctgacaacttctaagcaagccccttgcctccctttcctattatgct

SEQ ID NO: 54539 - DNA, 201 bp, Homo sapiens
tcactggcactaggagagttgccagaaaggaccagtaagtcctttctgtgggagtaactggaagagagaagggctctctcccaagtggcaattgtcaagcwttgggccttcactgtctgcacttgaggaaacagactccatagcgaacaaactatgactcctctcctcatctcccatagtcctgcaatcacagccccctct

SEQ ID NO: 54540 - DNA, 201 bp, Homo sapiens
gactgctgcaggcaccctccagttgggtgtcctgaggaccggctcctgtcagtgtccgcagggaaagcctggagtcaaagccccatggggaggagagatasgccatcagctcatgctgagtgcaaatgggtgccaggcatgtgctgggaatatgaaggtgaaggcaatccagtctctggtcactggcactaggagagttgc

SEQ ID NO: 54541 - DNA, 201 bp, Homo sapiens
tctgcagccctgggattggtatgtctctgccttgggaataataacacccacctcagagggatgatgaaggagctgtgcccagcctccagagcctggcccawggaaggtgctccacaaacatcagcttccgtttcccctgcccagtactctgggtttgaagtgcaggacaagccatgggggcgaggctctgcagatggagag

SEQ ID NO: 54542 - DNA, 201 bp, Homo sapiens
aagccaggatgggagacaagatggccatctccagcctgctggaccaccacaccaatgtctgaagaaaggcccgtgcccggaagaggccacttgcacggccrgccccatctcctctctccctctccagagccttcttgctggtctcaggtttcattctgatggttctgctcccagttaactcagctcaggataagctgtcca

SEQ ID NO: 54543 - DNA, 201 bp, Homo sapiens
ggaaggccaagggtagagccagctgggaagagacagtcctcattgctggccatggagggagtgagctgttgggagcaagggcccgtgtggctggagggtgraggtcagatgtaaggtagaacttttctaaagccaggatgggagacaagatggccatctccagcctgctggaccaccacaccaatgtctgaagaaaggccc

SEQ ID NO: 54544 - DNA, 201 bp, Homo sapiens
gggccagctccccacgctgctcggcatccgcaatggcgttctgcagattggcgcactacagatagaaaggaggagagtggggttgcttgggacctgaggtktctccttctgagtttctgggtcagacaaaccaaactatcatgaatcccagagagaaaccagtacatcgtgggtggcaggacactgaaacactggtactgg

SEQ ID NO: 54545 - DNA, 201 bp, Homo sapiens
ttggggaagctgtccatcagcggggggcaaacgattccccagtgatctgctcttacacttttccaggcagcaggttgctgcagggttttcccctctgggaraggcaatctgtagccttatattcttggttatgtgctagagggaaaatagagtttcatccttttctgcacaatttttttcttagggaaggcacagctatcc

SEQ ID NO: 54546 - DNA, 201 bp, Homo sapiens
aggtactagggacaaggcaggggacagggtccaagaagcataggatgcatggcttaccctttaagagatgagacataagccacattgcttcctgtcccaayctgtccttcccctccaccacccacaacttactaagtgtattattataaataaccatatgctgggatgggaaaagtttggatctagaaacagcagaattct

SEQ ID NO: 54547 - DNA, 201 bp, Homo sapiens
atacaaaaatatacatagatacatataatagatttttataataaatacattaaaatatacataaatagagtcttgatacgttgaccaggctggtctcaaaytcctggcttcatgcgatcctcccatctcagcctcccaaagtgctagaattacagacaggagccaccactcctgaccacattgtttcaatttttgaaattt

SEQ ID NO: 54548 - DNA, 201 bp, Homo sapiens
atttgtattctttaaaatatcctttgtaataaataggtagatgtaagtaaagtatttccctgagttttgtgagccactctagcaaattaatagaatccaargagggggtcttgagaaccccaatttagagctgaccggtcagaagcacaggtcacaacctgaggcttaccattgacatctgaaatgggggcagtctcaagg

SEQ ID NO: 54549 - DNA, 201 bp, Homo sapiens
tgttcatttgtattctttaaaatatcctttgtaataaataggtagatgtaagtaaagtatttccctgagttttgtgagccactctagcaaattaatagaayccaaggagggggtcttgagaaccccaatttagagctgaccggtcagaagcacaggtcacaacctgaggcttaccattgacatctgaaatgggggcagtct

SEQ ID NO: 54550 - DNA, 201 bp, Homo sapiens
cagagtattctgagcacaagcatcttggctaacagtgggcactttgcaaaagatgctccccaatgcacttgcccagtaatgtcctagcctgtcctaacctrgcctttgcttcatttcagtagtaaaaagcacacccctgggtggagatttaagatgctaatgagacatgcatcacatgaagaagcatgtccagagactgca

SEQ ID NO: 54551 - DNA, 201 bp, Homo sapiens
cagcggtctcgggtttgcgcactgcgcacagtatcctcatcacgacacgatggaagctgcggagctggggtcaaaataagaaggcgcagctgggacctggygacaccaagagaatggaagcccccagactcattgcgggtctctgccgggaagtgagtatgtaggcagcctgtgggcggaacctcaccttggccttgacgg

SEQ ID NO: 54552 - DNA, 201 bp, Homo sapiens
tttttttcagcaacacttacataaacacagtagaaatgtaatacttggttgtggaatgcctgaacaaatgaaaaataaatacatatgtctgtaattttttwaatttatttttaattgacaaataaaaattatacatatttatagtgtatgacatgatgttttgatacatcttttttttttttttttttttttttgagacag

SEQ ID NO: 54553 - DNA, 201 bp, Homo sapiens
gcactagattgaaaccaagaacttagacttttagacaaatacttaagattttagtttccagctctacctattagctgacttcctacaagcaaaattccatrtactccttcaaaatgtcaagttcagctaaccaactgaagtagctctttattctctaaatattacaggccctttaaaaaagaatatagttttggccaggcg

SEQ ID NO: 54554 - DNA, 201 bp, Homo sapiens
catatttatagtgtatgacatgatgttttgatacatcttttttttttttttttttttttttgagacaggatctggctctgtcacccagtctggagtgcagkggtgcaacctcggctcactacaacctttgcctactgagcttaagccatcctcctacctcagtctcctgagtagctgggactactggcacccaccaccacg

SEQ ID NO: 54555 - DNA, 201 bp, Homo sapiens
gttagatgtaatggacatacagtcatgtgttatagatttttatcatctaatattggaaaagttgttttgagtgagtggtttcattcctttaccgtagcgatttttttttggttttattattattattattattattattttttgagacagagtcttgctccgtcacccaggctggagtgcagtggcacgatcttaacccac

SEQ ID NO: 54556 - DNA, 201 bp, Homo sapiens
ttagatgtaatggacatacagtcatgtgttatagatttttatcatctaatattggaaaagttgttttgagtgagtggtttcattcctttaccgtagcgatttttttttggttttattattattattattattattattttttgagacagagtcttgctccgtcacccaggctggagtgcagtggcacgatcttaacccact

SEQ ID NO: 54557 - DNA, 201 bp, Homo sapiens
tagatgtaatggacatacagtcatgtgttatagatttttatcatctaatattggaaaagttgttttgagtgagtggtttcattcctttaccgtagcgatttttttttggttttattattattattattattattattttttgagacagagtcttgctccgtcacccaggctggagtgcagtggcacgatcttaacccactg

SEQ ID NO: 54558 - DNA, 201 bp, Homo sapiens
atggacatacagtcatgtgttatagatttttatcatctaatattggaaaagttgttttgagtgagtggtttcattcctttaccgtagcgatttttttttggttttattattattattattattattattttttgagacagagtcttgctccgtcacccaggctggagtgcagtggcacgatcttaacccactgcaacctcc

SEQ ID NO: 54559 - DNA, 201 bp, Homo sapiens
gatctctttatcacgatataatggcactgtatgtctcttttcacagtttttgacttaaaatgtatttgtctgacataagtgtggctactcctcctctcttytggtttccttttgtatgggatgtctttttatatctctttactttcagttcacgtttattcttgaagttgaagtgagtgttttgtaagcagcatagagttg

SEQ ID NO: 54560 - DNA, 201 bp, Homo sapiens
tgttgaaagtgcaatgttgaagtctcctactattattgtcttgctgtctacttctcccttcagacctattaatattttctttatgtatttatgttctccartgttgggtacataatagtgtgtgtgtgtgcgtgtgtgtgtgtgtgtattatatattgttccatattacctattgttctatcatcttgatgaattgatctc

SEQ ID NO: 54561 - DNA, 201 bp, Homo sapiens
tcctgctgctgttggatggaatattctgtatgtgtctgttaggtccatttagtctaaagtatagttcaagtccaatgttttcttattgattttctgtctgraaaatctatccattgttgaaagtgcaatgttgaagtctcctactattattgtcttgctgtctacttctcccttcagacctattaatattttctttatgta

SEQ ID NO: 54562 - DNA, 201 bp, Homo sapiens
aaaccctgcaccttccaaagaaaggtctggccattaaccacttattgggagataacctctaagcccttggaatgtcattcctgagaagaatgtctttgctyatctggggctttgggccacactagacagtttatgctaacaatgtgatttatgaaggggggtggggaggcaggtggctacatgatgtcagtttgactccaa

SEQ ID NO: 54563 - DNA, 201 bp, Homo sapiens
atttgagtcatctctcttttgttcttaggctagctaaaggtttgtcaattttgtttatgtcttcaaaaaagttttgttgatcttttctattcttttcctaktctcttttttttttcctgctctgatctgtattatttcgtttcttctactaacattgggcttagtttgttcttcttttttgagttccttaaggaataatgt

SEQ ID NO: 54564 - DNA, 201 bp, Homo sapiens
gactctatctctaggtagatggtatcagaattgagttaagttgtaggacacccagttggtgtctgctggagaatggcttggaagtctggtgaagagcccckacacattttgcattagaagtgttgtgctgaggggtatgtgggattaggaaaaacacttggtgtttcccatttcttaatagtggacatccttgtcttgttc

SEQ ID NO: 54565 - DNA, 201 bp, Homo sapiens
tctgcaaagcgatatgtatttttgtatgctaatgagatggctgatcactgagtactcctagataaccacaggatagttgccaggggtgccaaccatgtgaytggagggttgaaactttcagccacaccccccacctctagggaggggagaggggttgaaggctgatttggtcatcaaaggccaatcatacctacctaatga

SEQ ID NO: 54566 - DNA, 201 bp, Homo sapiens
acacaagtgatttttatatgtagatgctgtatcctaaaacttaactgaattcatttattaattctaacacttttgggtagaatctttaggttgttctatayataaaatcttgtaatcagcaaacagagacattttgacttcttttctgatttggatgacttttatttctttatgttgcccaattcctttggctaggacttc

SEQ ID NO: 54567 - DNA, 201 bp, Homo sapiens
gtcttcttcaattttattcattaattcattatgtttcatagttttcagtatacagatatttcacctttttggttaaatttatttctaattattttattccygttgatgctattataaatgtgactttttaaaaaatttcttgttcagatagtttattgccaaagtatagaaacacaagtgatttttatatgtagatgctgt

SEQ ID NO: 54568 - DNA, 201 bp, Homo sapiens
tattggacaagaatcattttcatcactaccaggtttctattagttaataactactcttacaaaattgtaaattaccctattaaacagttcactcagctgayctgggaaatccaaaccctgcaccttccaaagaaaggtctggccattaaccacttattgggagataacctctaagcccttggaatgtcattcctgagaaga

SEQ ID NO: 54569 - DNA, 201 bp, Homo sapiens
aatttaaagagtgaataagattattagaattcagcaatagagatatatctattttcaattcaactacagaaatatattttattggccgggtgcggtggctsatgcctataatcccagcactttgggaggccaaggtgggcagatcaggaggtcaggagatcgagaccatcttggctaacaaggtgaaaccccgtctctact

SEQ ID NO: 54570 - DNA, 201 bp, Homo sapiens
gtatgtacaatttaaagagtgaataagattattagaattcagcaatagagatatatctattttcaattcaactacagaaatatattttattggccgggtgyggtggctcatgcctataatcccagcactttgggaggccaaggtgggcagatcaggaggtcaggagatcgagaccatcttggctaacaaggtgaaaccccg

SEQ ID NO: 54571 - DNA, 201 bp, Homo sapiens
ggaggatctcttgagcccagaagtcaaggctgcagtgagcaaagatcccaccacagcactccagcctgggtgacagagcaagatactgtttcaaaaaaaamcacagaagaacattaataaatcaccagtatagtaagagatttttgacatattcctttcagtttttgacatattccttctgttaattttgacatattaatt

SEQ ID NO: 54572 - DNA, 201 bp, Homo sapiens
ctgtatgtacaatttaaagagtgaataagattattagaattcagcaatagagatatatctattttcaattcaactacagaaatatattttattggccgggygcggtggctcatgcctataatcccagcactttgggaggccaaggtgggcagatcaggaggtcaggagatcgagaccatcttggctaacaaggtgaaaccc

SEQ ID NO: 54573 - DNA, 201 bp, Homo sapiens
gaggctttggaccattggttacaaaacagacacagccaagataagatccacacacacattattaacaaggaagtgatttgctgcaccttgagttgagaggrctacatgtagaaaagtcttaaaatagagctaaacaccacagtggtcaacaaagccatcataatgttggtgtttgtttccctccaatgtatgtatgtttag

SEQ ID NO: 54574 - DNA, 201 bp, Homo sapiens
aatgtccgctttgtagaattgctcatgtaagttccggggatcattaatgggtattgaccagtggtattgaatggtcatgtgtcaagcaacaaggctcatawgaaccctgacctatgtccatagcaccagggcaaagcatggtgggccgcatattctgaatgttaacatgcctgagggaaatacatccactacagggccttc

SEQ ID NO: 54575 - DNA, 201 bp, Homo sapiens
tattattgtcttgctgtctacttctcccttcagacctattaatattttctttatgtatttatgttctccaatgttgggtacataatagtgtgtgtgtgtgygtgtgtgtgtgtgtgtattatatattgttccatattacctattgttctatcatcttgatgaattgatctctttatcacgatataatggcactgtatgtct

SEQ ID NO: 54576 - DNA, 201 bp, Homo sapiens
tctgccatattgtccttttaccttggataataaatctaaattctttttctataataaaccataactatgagtagaacagcttttctgagttctgtggttcyttccagcaaattattgaacccgagggtggtcttaggaaccctataccacaaataattaacagcaaatcaaaaaaagttacaaagtttcccctgaggggaa

SEQ ID NO: 54577 - DNA, 201 bp, Homo sapiens
cattatttattccatatgggtctatgtacttctacagtgtttcatttctttgcaaagagcgtatatttatgtactacttatataattaaaatctattaatwattaaatatattaaaagttaaaggatagaaagataaaataataaagagaagataggttatatacagataatccaaatgttaaaaataaaaggaagtgaaa

SEQ ID NO: 54578 - DNA, 201 bp, Homo sapiens
tcaactttccaccttcttaatggctctggtaaaagttgaggacaaatttgaaaattattgaagaggaccatttagacttcatgaatgctaattgcctttayttccctctataagtaatctatgacttacgttgtaacttccaagtgaagaaagaactagacaaaggggtaattcatttattccgctactactaaagactaa

SEQ ID NO: 54579 - DNA, 201 bp, Homo sapiens
actattaattagagaaacttaaattgaagtgtgatttttctattgcacatcaaattagcaaagtttttgtcttattaatatttttaaatataatgcccccrtgtaggcaagtgattaaatgctagtgagtgcaaattggttcagccttactaaaaaaacaatttgtcaatatgtatcaagggccttaaaaaatgttcacag

SEQ ID NO: 54580 - DNA, 201 bp, Homo sapiens
attttggtttcttctttgattaacagttgttcatgagagttcttatttattttaatttctgatgtagagctttatcttctatcttggatattttatttttmatcatgctgagctcagataatatcatcaatcaatgtttttaatatttcatgagattgtgacaagattattctaaagtactgggttagatgtaatggacat

SEQ ID NO: 54581 - DNA, 201 bp, Homo sapiens
gtggcgcgatcatcctgaatacccatttcatgatgaatactgactgccgggagttcctgaacagatttttcactcccatgagtgccaagacggtgcaatgsgtagtcccctagatgtgaaaatgaagagagagggttttaccatcctgagaagaaataatgatggaaacatgtttaatgtttgtgcagtgtaaatgacttt

SEQ ID NO: 54582 - DNA, 201 bp, Homo sapiens
tgtactaagtgaaaggaacaaaaatctaacagatgctccaaaaaaaatgcataaagcaaaagtgatcaaattaaacttaaagtgtgtattatctataaaawtattaagatcaaataataaaaggaaaatgaacccataatacgctacaattaaagtttatatatatactattagcatcacagatgttgagggtagataaat

SEQ ID NO: 54583 - DNA, 201 bp, Homo sapiens
ttctttttttttttttttttttttttttttgacagagtctcaccctattgcccaggctggaatgcagtggcgcgatctcagctcactgcaccctctgcctyttaggttcagattattcttgtgccttagcctcctgagtagctgggacaacaggcgcacacgactatgcccagataatttttgtatttttagcagagacgg

SEQ ID NO: 54584 - DNA, 201 bp, Homo sapiens
tcaggggttcgagaccagcctggctaacatggtgaaaccccgtttctactaaaaatacaaacaaatagctgggcatggtggcacatgcctgtaatcccagstaatcgggaggctgaggcaggagaatcgcttgaacccaggaggtggaggttgcagtgagccgagatcacgccattgcactccagtttgggcaacaagagt

SEQ ID NO: 54585 - DNA, 201 bp, Homo sapiens
atgacatgatgttttgatacatcttttttttttttttttttttttttgagacaggatctggctctgtcacccagtctggagtgcagtggtgcaacctcggytcactacaacctttgcctactgagcttaagccatcctcctacctcagtctcctgagtagctgggactactggcacccaccaccacgcccagctaattttt

SEQ ID NO: 54586 - DNA, 201 bp, Homo sapiens
aataattaacagcaaatcaaaaaaagttacaaagtttcccctgaggggaatcagtccttgaggaagcctgctagacaatccccacaacaacactgaaagtsgacacattttttttcatccactttcaaattttagataatttttcttaatgtatcttagagaaaatacgaagtgtgagactttaatgagctgtggcaggaa

SEQ ID NO: 54587 - DNA, 201 bp, Homo sapiens
ggaaaagttcaagattgggcatctggtgaggccatttatggtaggaggtgaaggggagctggaatatgcagagatctcatggcaagagaggaagccagagrgggaggtgcaaggctctgtttaacaattacctctcatgggaactaacagagtgagaacacagtcacccccaatggagggcattaacttactcatgagaga

SEQ ID NO: 54588 - DNA, 201 bp, Homo sapiens
tggaggttgcagtgagccgagatcacgccattgcactccagtttgggcaacaagagtgaaactccaactcaaaaaaaagaaaaaagaaaagaaagaaactsctagaatacaacccctgaaccctttgatgctcctggggactcctgcaactccacccgtctcccagaagctgtcatttcctgtgcagtgggaggtgaagtc

SEQ ID NO: 54589 - DNA, 201 bp, Homo sapiens
aatatattttattggccgggtgcggtggctcatgcctataatcccagcactttgggaggccaaggtgggcagatcaggaggtcaggagatcgagaccatcytggctaacaaggtgaaaccccgtctctactaaaaatacaaaaaattagccaggcgcggtggcgggggcctgtaatcccagctactcaggaggctgaggca

SEQ ID NO: 54590 - DNA, 201 bp, Homo sapiens
aaaaaattacacttcagaaaagacatcaaaggcaacatatgacaacaagtaatttatgaatctgggtagtagcgttggtaatctgagttctttaagggttmacaggacaacgaagtgcatgtggcagtgtgctggcagtggccttgaggctttggaccattggttacaaaacagacacagccaagataagatccacacaca

SEQ ID NO: 54591 - DNA, 201 bp, Homo sapiens
tgtgggggaattgttttggcaggtggcgcgatcatcctgaatacccatttcatgatgaatactgactgccgggagttcctgaacagatttttcactcccaygagtgccaagacggtgcaatgggtagtcccctagatgtgaaaatgaagagagagggttttaccatcctgagaagaaataatgatggaaacatgtttaatg

SEQ ID NO: 54592 - DNA, 201 bp, Homo sapiens
actcaccaaataccggaaaaagttggtattactatattaatatcatataacacagacttaaaaattaaaagcattattagggataaaaagagttgtgcgtraagatgaaagattgaatttaccaaaaagatatactaattttaagcacatatatatcaaataaagtatcttcaaaatatataaaacaaaaaattgacagaa

SEQ ID NO: 54593 - DNA, 201 bp, Homo sapiens
cagaaataagaattcttcacatttgaaattttaggggatttcattaacatttgtggtttcagagcatttggaatttcttgtaagatgtccccagaaagacsgtctcaaaaacaaagggcagaacagagtatccagctccacctcagtgggtagccccccaacaccagcctgactcctcttagacatttgcagagatattca

SEQ ID NO: 54594 - DNA, 201 bp, Homo sapiens
gtttttcttagcttgtcgataaatttctaacttcttaggttgaatacctatttcattctttttttggtttttcttctcatttagtaatataaacattgaawacaataaatgtttctctacgtactgttttggttaagatcttataaatgtaatgttttcaattttgttattttctagacattctgaaatttgattttggtt

SEQ ID NO: 54595 - DNA, 201 bp, Homo sapiens
aggccgaggcaggaagattgcttgagaccaggagtttgagagcagcctgggcaacaaagcgagatcccattgctttaaaattaaaaaaagttaagttaaaycatcagtttaggctgggtgcggtggctcactcctctaatcccagcaccttgggaggctgaggcaggtggatcacctgaggtctggagtttgagaccatct

SEQ ID NO: 54596 - DNA, 201 bp, Homo sapiens
ctgatctgggaaatccaaaccctgcaccttccaaagaaaggtctggccattaaccacttattgggagataacctctaagcccttggaatgtcattcctgaraagaatgtctttgctcatctggggctttgggccacactagacagtttatgctaacaatgtgatttatgaaggggggtggggaggcaggtggctacatgat

SEQ ID NO: 54597 - DNA, 201 bp, Homo sapiens
caaattaactcagtcaattctaactttcaggagtattcacttgttatgccccacttccacatagcgatttttccatcaggatgttattagttcctagtaayagaaatgcaattcagactagtttaagcagaaatagtgaattcactttgtcacagaactggaaacaaagaagtgcaggggtaaagtggctgtaagcagcta

SEQ ID NO: 54598 - DNA, 201 bp, Homo sapiens
tagctcactataaccttgaactcctggcctcaagagatcctcctgcctcagcctcccaaagctctgggatcacaggtgtgagccaccatgctcagcattayagttatttttaatgttcttttcttttaacctttgtgttgaagatataagtgacagatgagtgatatacgtatttatggttttattcctttttctactaat

SEQ ID NO: 54599 - DNA, 201 bp, Homo sapiens
gcgatttttccatcaggatgttattagttcctagtaatagaaatgcaattcagactagtttaagcagaaatagtgaattcactttgtcacagaactggaarcaaagaagtgcaggggtaaagtggctgtaagcagctagaactagggctcaagcagtgtgtttacaacttgtgactgttttcaccccgttggactagctgt

SEQ ID NO: 54600 - DNA, 201 bp, Homo sapiens
gcccaagctgttcctggtcccctttgatccacggctggagctggagtgactgggatggagggagcagggtcccaaggttgtacagggtagtggggcccagkgcctggcccacaaaaccattcagtcctgctatgcctctgggcctgtgatggaagcggctgcgaaagtctctgaaatgccttcaagacctcttgcccattg

SEQ ID NO: 54601 - DNA, 201 bp, Homo sapiens
tgacctcaggcgatctgcccgcctcgggctcccaaagtgctggaattataggtgtgagccaccgtgcccagtcaatatctggctaatttttaaattttttrtaaagatagagtctcactctattgaccagggtagtctcaaactcccggtctcaagggatcctcctgttttggcctctcaaagtgctgagattacacggat

SEQ ID NO: 54602 - DNA, 201 bp, Homo sapiens
tgtccaattttaaccgcaggcagctggagctcatcctgaacaagccaggactcaaacacaagccagtcagcaaccaggtacagcctaatagcttccactakggtgtggggagtgggggcaggatttacatgacacaaagaagcctcagctgggagtcaggaaggctcatgattgctccacctaaatctcatcatgggaccc

SEQ ID NO: 54603 - DNA, 201 bp, Homo sapiens
tgggagtgtccaattttaaccgcaggcagctggagctcatcctgaacaagccaggactcaaacacaagccagtcagcaaccaggtacagcctaatagcttycactagggtgtggggagtgggggcaggatttacatgacacaaagaagcctcagctgggagtcaggaaggctcatgattgctccacctaaatctcatcatg

SEQ ID NO: 54604 - DNA, 201 bp, Homo sapiens
cagctgtgcaatttttgagtgaacttttttctgtgggggaattgttttggcaggtggcgcgatcatcctgaatacccatttcatgatgaatactgactgcmgggagttcctgaacagatttttcactcccatgagtgccaagacggtgcaatgggtagtcccctagatgtgaaaatgaagagagagggttttaccatcctg

SEQ ID NO: 54605 - DNA, 201 bp, Homo sapiens
aaattcactgccatcatcatcgtcataatcatccagcaaacttattttgctactcatcacctttctagatctcaaactctcaacacgcaggaggtctagtkagaggggcaagtaaaaatgctaatgagactgggtgtggtggctcacacctatagtcccagcactttgggaggccgagacagggcgactgcttcagcccag

SEQ ID NO: 54606 - DNA, 201 bp, Homo sapiens
gaaaccaggtgcagtgtctcacatctgtaattccagcactctgggaggctaagataggagaatcacttgatgctaggagttcgacaccagcctggacaacrtagcaagaccctatctctacaaaaaatttaaaaataagccatcatggtggcatgcacctgtagtactagctacttaggacgctgaggtgggaggatcact

SEQ ID NO: 54607 - DNA, 201 bp, Homo sapiens
ttctctattaatgtttccagttcttcaaatcacctgaatattcatcttcatcttgaatctttaagtgaacattcagaaaatgctaagatgattcatatagyttggacacttactttactgatcctactgtttttcatgggtcagaaagtacagtgactggattaatattgaatttctgaattaataaaacaacttcctaat

SEQ ID NO: 54608 - DNA, 201 bp, Homo sapiens
atacatatatatactcatatacacacacatgcatttttttcttcttaatcattctctattaatgtttccagttcttcaaatcacctgaatattcatcttcrtcttgaatctttaagtgaacattcagaaaatgctaagatgattcatatagtttggacacttactttactgatcctactgtttttcatgggtcagaaagta

SEQ ID NO: 54609 - DNA, 201 bp, Homo sapiens
tgggtgtagtggcagttgcctgtaattccagctactcaggaggctgaggcaggagaattgcctgaacccaggaggcagaggttgcagtgagccgagatcaygccattgcactccagcctgggcaacaagagcaaaactccatctcaaaaaaaaaaaaaaaaaaagaatatatttgctatatatgtgtgtatagatatacac

SEQ ID NO: 54610 - DNA, 201 bp, Homo sapiens
tggagaaaccccgtctctactaaaaatacaaaaattagctgggtgtagtggcagttgcctgtaattccagctactcaggaggctgaggcaggagaattgcytgaacccaggaggcagaggttgcagtgagccgagatcatgccattgcactccagcctgggcaacaagagcaaaactccatctcaaaaaaaaaaaaaaaaa

SEQ ID NO: 54611 - DNA, 201 bp, Homo sapiens
cttaggtcgggagttagagatcagcctggccaacatggagaaaccccgtctctactaaaaatacaaaaattagctgggtgtagtggcagttgcctgtaatyccagctactcaggaggctgaggcaggagaattgcctgaacccaggaggcagaggttgcagtgagccgagatcatgccattgcactccagcctgggcaaca

SEQ ID NO: 54612 - DNA, 201 bp, Homo sapiens
aagaatcattttcatcactaccaggtttctattagttaataactactcttacaaaattgtaaattaccctattaaacagttcactcagctgatctgggaartccaaaccctgcaccttccaaagaaaggtctggccattaaccacttattgggagataacctctaagcccttggaatgtcattcctgagaagaatgtcttt

SEQ ID NO: 54613 - DNA, 201 bp, Homo sapiens
aagtgatccacccaccttggcctgggccactgtgcccagccaatcctttgtatttctgtgttatctgctgtaatggctcctctttggtttctaattttatwtgagtcatctctcttttgttcttaggctagctaaaggtttgtcaattttgtttatgtcttcaaaaaagttttgttgatcttttctattcttttcctagtc

SEQ ID NO: 54614 - DNA, 201 bp, Homo sapiens
tgaggcaggagaattgcctgaacccaggaggcagaggttgcagtgagccgagatcatgccattgcactccagcctgggcaacaagagcaaaactccatctmaaaaaaaaaaaaaaaaaaagaatatatttgctatatatgtgtgtatagatatacacacacatatacatatatatactcatatacacacacatgcattttt

SEQ ID NO: 54615 - DNA, 201 bp, Homo sapiens
gagattactggcgtgagcccctgcacccagccttgatacatctttttatattgtgaatccattaacaaattattgtagttacagttttttggttttgtgtktttttttttttttttttttttttagagacagggtcttgctgtcattcaggctggactgcagtggctcaatcatagctcactataaccttgaactcctggc

SEQ ID NO: 54616 - DNA, 201 bp, Homo sapiens
ccaaagtgctgagattactggcgtgagcccctgcacccagccttgatacatctttttatattgtgaatccattaacaaattattgtagttacagttttttkgttttgtgtgtttttttttttttttttttttttagagacagggtcttgctgtcattcaggctggactgcagtggctcaatcatagctcactataaccttg

SEQ ID NO: 54617 - DNA, 201 bp, Homo sapiens
gcaacacagtgaaactccactcaaaaaaaaaaaaggaatgtttcttgatctttttgtagttcatgagcgtgatgactgagtgttcatgtgcatgtgtgagrcgtgccacccttaaaccttgttataacatcagcacattacccacatgacacgaaaaaaaatgtttcttatccctgacagttctccaagagggcctccttc

SEQ ID NO: 54618 - DNA, 201 bp, Homo sapiens
cagtactatgttgaaaaaaaaagtggtgagagtgagtgtaatattgtgatataataaaatatatatatacttggtctctgtccctggttccaggcacaaarctgctaaaatccttgaaatctgcaaagcgatatgtatttttgtatgctaatgagatggctgatcactgagtactcctagataaccacaggatagttgcca

SEQ ID NO: 54619 - DNA, 201 bp, Homo sapiens
caaactagaaggcaaaaataatgcatgataaaaagttgcacatctacacatgctcagaaattttgccacataaagactcacactggaaatcattaggtccrattgatgtactaagtgaaaggaacaaaaatctaacagatgctccaaaaaaaatgcataaagcaaaagtgatcaaattaaacttaaagtgtgtattatcta

SEQ ID NO: 54620 - DNA, 201 bp, Homo sapiens
aaaagttggtattactatattaatatcatataacacagacttaaaaattaaaagcattattagggataaaaagagttgtgcgtgaagatgaaagattgaayttaccaaaaagatatactaattttaagcacatatatatcaaataaagtatcttcaaaatatataaaacaaaaaattgacagaatacaggaggacattggc

SEQ ID NO: 54621 - DNA, 201 bp, Homo sapiens
tgtattttttagtagagacagggtttcaccatgttggccaggctggtctcgaactcctgacctcaggcgatctgcccgcctcgggctcccaaagtgctggrattataggtgtgagccaccgtgcccagtcaatatctggctaatttttaaattttttgtaaagatagagtctcactctattgaccagggtagtctcaaact

SEQ ID NO: 54622 - DNA, 201 bp, Homo sapiens
tggcaggtggcgcgatcatcctgaatacccatttcatgatgaatactgactgccgggagttcctgaacagatttttcactcccatgagtgccaagacggtrcaatgggtagtcccctagatgtgaaaatgaagagagagggttttaccatcctgagaagaaataatgatggaaacatgtttaatgtttgtgcagtgtaaat

SEQ ID NO: 54623 - DNA, 201 bp, Homo sapiens
tagacatttgcagagatattcatacatctttggaaggctcccaccggtggccccactttctgatcccaagcttgaccttcaaaaatgttctattatttccrttatttcagatctttgacttttctctcactgaagaagaaatgaaggacattgaagccttgaataaaaatgtccgctttgtagaattgctcatgtaagttc

SEQ ID NO: 54624 - DNA, 201 bp, Homo sapiens
agctttaatcttgaaaggatcaaagaaaattttcaggtaagagaattgcttttggagatgtgaaaagatgggtatgtttgctatttttgcttttatagaaygtgttcagcttaataggaaacctgtaacactctcatattttattttataccagccccttgacccatgtagcccatatctaggtttaattttcattcaatt

SEQ ID NO: 54625 - DNA, 201 bp, Homo sapiens
ggagattctattaataaaatggattttattgaagaattttttttaacagtacaattgcattcaacaacgtggccttgattttgtgctctgctctccaatgyaaccacataggttgagtgccatccgtatttcacccagccaaaactcttgaaattttgccaacaacatgacattgtcattactgcatatagccctttgggg

SEQ ID NO: 54626 - DNA, 201 bp, Homo sapiens
atccacaccagtcgttctccacccttatccgacagctctttgacttcctctcccataagaatcttgtcctatatatttcagccactaattcccatgcctakcccttggaaattgcaataacaacttcctaataaatcctccatagcctcaatttcaaacatccccctctctttcctacactagcaattgttcctctctact

SEQ ID NO: 54627 - DNA, 201 bp, Homo sapiens
agctctatcttagcaaatttcaagtatacaatatagtattattgaccatagtcaccatgccataccttaggtctccagaacttattcatcttctaactgcmaggttgtatcctttgaccaacatctcctcatttctcccctacctcaaccctgttactacccttctattctttgtttctatgggttcagctattttagatt

SEQ ID NO: 54628 - DNA, 201 bp, Homo sapiens
taggttttagcttcctgcttccctcacttcagattcccaaaaaaatgatatagtagaaatctccatcagcactgaaaattaagaaggttgctgcctatcakagggtgtaaatgagaagaaactgtcaaagtataattttttacaaatcaggccgggcatggtggctcacacctgtaatcccagcactttgggaggccaagg

SEQ ID NO: 54629 - DNA, 201 bp, Homo sapiens
atgagaatgaaaatcacagccaattctcactctttagggaatagactcacccaataaccatgaattttgctgggtatgaaagcaaggagcaacaaaataawaaattatgctctcttagaatgaaggtaaaataaactgttagaaatattttaaaagaatggcaaagatcaataaagcataaagaataaagggaaaaataaa

SEQ ID NO: 54630 - DNA, 201 bp, Homo sapiens
aagagatcaactgcattactaatgtgtaggctcattgaagattaaaacacattttgatggactttttgaggactgaaaattttgctgttcaaaaattatargagtgttacaagtgacctttgcgatggaaagcatttggactttatagcatctagcaaatcgcaattttgtaccagagaaaatgccactctccttgaaatt

SEQ ID NO: 54631 - DNA, 201 bp, Homo sapiens
tcctgacaataacatttgccaaaatgcctcatcctaaaaagtggttgacactcttttccacaatcttagaaagagatcaactgcattactaatgtgtaggytcattgaagattaaaacacattttgatggactttttgaggactgaaaattttgctgttcaaaaattataggagtgttacaagtgacctttgcgatggaaa

SEQ ID NO: 54632 - DNA, 201 bp, Homo sapiens
agccacaatattagacaattacatcttcagagcttttttgctacatgatagaatgcaactcaaactttagcaaaaaataaaagataatttattggcttgcrtaactggaaagtccatgagtagatcagaaatggctagacacaggtactcaaatgatttataaagagatttagtcctctctctctctccctcctttctctc

SEQ ID NO: 54633 - DNA, 201 bp, Homo sapiens
tacaataatacctttaatgtcatgacaggcccttacctactctacaaatttgtggtaacaaagtatattgaaaactgtatgaatcaccctgatgcccacaraaaatagatgactgtgcacactgagcactactgaattcacatcccttgataaagaattttgccttcatattaaactatttgtaatttatgttgttataca

SEQ ID NO: 54634 - DNA, 201 bp, Homo sapiens
ggtgtatcgagttatttttgcttcttttctggattttacttagagcaaatttcccaaaggaaaagaaaatgtattgatttgttctactgttttttgtttgyttgttttctgtcttcttttactgatatcttttgttggtttttcttagcttgtcgataaatttctaacttcttaggttgaatacctatttcattctttttt

SEQ ID NO: 54635 - DNA, 201 bp, Homo sapiens
ttttcaggtaagagaattgcttttggagatgtgaaaagatgggtatgtttgctatttttgcttttatagaatgtgttcagcttaataggaaacctgtaacrctctcatattttattttataccagccccttgacccatgtagcccatatctaggtttaattttcattcaatttgagacaattgctagtacttcagagattg

SEQ ID NO: 54636 - DNA, 201 bp, Homo sapiens
aactcctggcctcaagagatcctcctgcctcagcctcccaaagctctgggatcacaggtgtgagccaccatgctcagcattatagttatttttaatgttcwtttcttttaacctttgtgttgaagatataagtgacagatgagtgatatacgtatttatggttttattcctttttctactaatcaattagtggtgtatcga

SEQ ID NO: 54637 - DNA, 201 bp, Homo sapiens
ccaccaatagcgtacaagagttccagtttctccacattcttgccaatacttgatatctttcatggttttgataattgccatttattgcctttttctgttgmgtatttgtatgtcttccttggaaaaatatctgttcaggttctttgctcattttaaaatcaggttgtttttctactactgagttgtaagagttccttatat

SEQ ID NO: 54638 - DNA, 201 bp, Homo sapiens
acttctttctattggtgtcactttaaaaaacggacttggggcctggtgcggtggctcacgcctgtaatcccagcactttgggaggccgaggcaggcgatcrcgaggtcgggagtttgagaccagcctgaccaacatggtgaaaccccgtctgtactaaaaatacaaaaattagctgggcttggtggcacatgcctgtaatc

SEQ ID NO: 54639 - DNA, 201 bp, Homo sapiens
agattgacaatttaaaaggaggcacctaagcaaaaagacatgtgaaagttaaaactttacaggtaaaaaaaaacacacactcaccaaataccggaaaaagytggtattactatattaatatcatataacacagacttaaaaattaaaagcattattagggataaaaagagttgtgcgtgaagatgaaagattgaatttacc

SEQ ID NO: 54640 - DNA, 201 bp, Homo sapiens
taggataccctgaccccagggctatatccctattcctgtgctgaagaagttaacagacagctccactagaagggggaaggaaagttcgtaaaaagaaaaarggcgaaaagatgctgaatagttacatcaactcctgacaataacatttgccaaaatgcctcatcctaaaaagtggttgacactcttttccacaatcttaga

SEQ ID NO: 54641 - DNA, 201 bp, Homo sapiens
cgggcatggtggcgggtgctggtggtcccagctactcgggaggctgaggcaggagaatggtatgaacccgggaggcagagcttgcagtgagccgagatcgygccactgcttccagcctgggtgacagagcgagactccgtctcaaaaacaaaaaaaaacaaaaaacgctggatctcaaagtttagataagtttccctggtt

SEQ ID NO: 54642 - DNA, 201 bp, Homo sapiens
acaaacaaaaacagtataatcaatccaccaatgtactaattgttttacagacagttggtgacattattcagtttgacatctgacatatttaaaagcaattytagcaacttcggggaaaaaaaaataactcttaccaggaaataactagaaaaatcagcaaggtggaacaagaattaggccccattaatcacaaatactgta

SEQ ID NO: 54643 - DNA, 201 bp, Homo sapiens
gagatattggaccatgatttttttcagcttttatcaagttgatttttaacatttgaaaatcttaatattttccattttaatttacagtacatgcagaaaamtaaatcaggaacacacacattccagacattttacagaccatttcatcattgttatttaagagctaaattcactgccatcatcatcgtcataatcatccag

SEQ ID NO: 54644 - DNA, 201 bp, Homo sapiens
tgagattactggcgtgagcccctgcacccagccttgatacatctttttatattgtgaatccattaacaaattattgtagttacagttttttggttttgtgkgtttttttttttttttttttttttagagacagggtcttgctgtcattcaggctggactgcagtggctcaatcatagctcactataaccttgaactcctgg

SEQ ID NO: 54645 - DNA, 201 bp, Homo sapiens
tcctgaatacccatttcatgatgaatactgactgccgggagttcctgaacagatttttcactcccatgagtgccaagacggtgcaatgggtagtcccctakatgtgaaaatgaagagagagggttttaccatcctgagaagaaataatgatggaaacatgtttaatgtttgtgcagtgtaaatgactttgactcagtcaca

SEQ ID NO: 54646 - DNA, 201 bp, Homo sapiens
gaacatacctatttatccatttaaaaaaatccacattatgtttggccaggttttacagagcacttttgatcacattacacaataggaagggcaagtaatayaccaatttttcacttgtaaaaatggagactctgtgttttttttcagcaacacttacataaacacagtagaaatgtaatacttggttgtggaatgcctgaa

SEQ ID NO: 54647 - DNA, 201 bp, Homo sapiens
cagcaatagagatatatctattttcaattcaactacagaaatatattttattggccgggtgcggtggctcatgcctataatcccagcactttgggaggccmaggtgggcagatcaggaggtcaggagatcgagaccatcttggctaacaaggtgaaaccccgtctctactaaaaatacaaaaaattagccaggcgcggtgg

SEQ ID NO: 54648 - DNA, 201 bp, Homo sapiens
aaaatacaaggggaagatatggcatacacatgttttccaaattcaatcatagaattactgccttttcccaccatccttcttttactttttttcgcaagatkcttattaacatacccaggaactttcctttttaaagaattcacagtcacccttataaacattcattcttgcttcttgtgaggcttgtttgttgacctgtgg

SEQ ID NO: 54649 - DNA, 201 bp, Homo sapiens
agaagaatggcatgaacccgggaggaggagcttgcagtgagccgagatagcgccactgcagtccggcctgggtgaaagagcgagactccgtctcaaaaacmaaaaaaaaagaaaagaaatatattttattcattcacattaggtcactgtcatactgtcataggatgagagagttcttcaaaaattatgttttcccaagat

SEQ ID NO: 54650 - DNA, 201 bp, Homo sapiens
aaagagaaaaagaaggaaggaaagaaagaaggaaggaaggaaggaaggagggaaggaaggaaggaagggagggagggagggaggcaggcagagagggaggkatggaaggagtgacggagggaggaaggaagaagaaaaaggtggtaccattatgaaagagcagaaacttgagtcctggtccctgttgtgaaagtccttaaa

SEQ ID NO: 54651 - DNA, 201 bp, Homo sapiens
aaggttgctgcctatcagagggtgtaaatgagaagaaactgtcaaagtataattttttacaaatcaggccgggcatggtggctcacacctgtaatcccagmactttgggaggccaaggcaggcagatcacctgaggttgggagttcgagaccagcctgaccaacatggagaaaccccgtttctactaaaaatacaaaatta

SEQ ID NO: 54652 - DNA, 201 bp, Homo sapiens
cagcaaattattgaacccgagggtggtcttaggaaccctataccacaaataattaacagcaaatcaaaaaaagttacaaagtttcccctgaggggaatcaktccttgaggaagcctgctagacaatccccacaacaacactgaaagtggacacattttttttcatccactttcaaattttagataatttttcttaatgtat

SEQ ID NO: 54653 - DNA, 201 bp, Homo sapiens
cttgtaatcagcaaacagagacattttgacttcttttctgatttggatgacttttatttctttatgttgcccaattcctttggctaggacttcagtactaygttgaaaaaaaaagtggtgagagtgagtgtaatattgtgatataataaaatatatatatacttggtctctgtccctggttccaggcacaaagctgctaaa

SEQ ID NO: 54654 - DNA, 201 bp, Homo sapiens
caatcacctcccaccacgccccacctccaacactggggattacaatttgacatgagatttgggtggaacacagatccaaaccgtatcattctgcccctggsccctcccaaatctcatgtccttctcacatttcaaaatacaatcatgccctcccaacagtccttcaaagtcttaactcattccagcattaactcaaaagtc

SEQ ID NO: 54655 - DNA, 201 bp, Homo sapiens
gtccttctcacatttcaaaatacaatcatgccctcccaacagtccttcaaagtcttaactcattccagcattaactcaaaagtccacagtctcatccgagrcaaagcaagtcccttccacctacaagcctgtaaaataaaaaacaagttagtcactcctaatataggcattgggtaaatactcctgttccataagggagaa

SEQ ID NO: 54656 - DNA, 201 bp, Homo sapiens
aattcacagtcacccttataaacattcattcttgcttcttgtgaggcttgtttgttgacctgtggacatttactctacaggcgatggaagcttgcaaagaygctggcttggtgaaatccctgggagtgtccaattttaaccgcaggcagctggagctcatcctgaacaagccaggactcaaacacaagccagtcagcaacc

SEQ ID NO: 54657 - DNA, 201 bp, Homo sapiens
ggaggtgttcatgatcttgattgtaatgatgattttacaggtgtatgcacacattaaaattcctcaaaatgtacacttcaaaaatgtgtagtttattgtayatcagttataactcaccaaactagaaggcaaaaataatgcatgataaaaagttgcacatctacacatgctcagaaattttgccacataaagactcacact

SEQ ID NO: 54658 - DNA, 201 bp, Homo sapiens
tctggaaaatctatccattgttgaaagtgcaatgttgaagtctcctactattattgtcttgctgtctacttctcccttcagacctattaatattttctttrtgtatttatgttctccaatgttgggtacataatagtgtgtgtgtgtgcgtgtgtgtgtgtgtgtattatatattgttccatattacctattgttctatca

SEQ ID NO: 54659 - DNA, 201 bp, Homo sapiens
aaacccgggaggtggaggttgcagtgagccgagattgcgccactgcactccagcctgggcgacagagtgtgacttcgtctaacaacaacaacaacaacaamaaaaaatctaatgaaaatcaatgaaaaaaaatgagaaaaaacactaaggctcaacagaaaaaggagtaaaaggaatgaacagaaattcacgaaagacaaa

SEQ ID NO: 54660 - DNA, 201 bp, Homo sapiens
cccgggaggtggaggttgcagtgagccgagattgcgccactgcactccagcctgggcgacagagtgtgacttcgtctaacaacaacaacaacaacaaaaamaaatctaatgaaaatcaatgaaaaaaaatgagaaaaaacactaaggctcaacagaaaaaggagtaaaaggaatgaacagaaattcacgaaagacaaattg

SEQ ID NO: 54661 - DNA, 201 bp, Homo sapiens
gattttttttaaatatgcttgacaaaattacataccacaacatgacatcctctatttcacaaaagttttgcagaatgttcataaagagaataattatcacmaaaattttggagggctttatctgaaggagatttttaattctttaatttttttttcaagtcacactcttttgacatatctatcaaagtagatttttaactg

SEQ ID NO: 54662 - DNA, 201 bp, Homo sapiens
gagccgagattgtgccactgcactccagcctgggcaacacagtgaaactccactcaaaaaaaaaaaaggaatgtttcttgatctttttgtagttcatgagygtgatgactgagtgttcatgtgcatgtgtgaggcgtgccacccttaaaccttgttataacatcagcacattacccacatgacacgaaaaaaaatgtttct

SEQ ID NO: 54663 - DNA, 201 bp, Homo sapiens
atcctgcatctttgcaaggtttgcaacctcactttgccattagattattccatatatttactggataagaggctgatcctccaagacttaaaggagaggaytagtgtttagcaaaaaagaagtctgagtaaggattcattttataggcgattcattcatttttatattgtgcacatttttgattccttatgtaatctcata

SEQ ID NO: 54664 - DNA, 201 bp, Homo sapiens
tgtaattagaataaaaaggtagaagagacataaaaaatgagagaaaggatttcaacatagcaaattaaaagttaaaaacaaagcaaattaaaagttttttwaaaaagcaaatttaggccaggcgtggtgaggctcatgcctgtaattgcagcactttgggaggctgaggtgggaggatcgcttgagttcaggagtttgaga

SEQ ID NO: 54665 - DNA, 201 bp, Homo sapiens
tgaggcatgagactagcttgaacccaggaggtggaggttgcagtgagccaagatgataccacagcactccagcctgggtgacagagtaagaccctgtctcaaaaaaaaaaaaaaatcatatttagagactcagaattttttaagtgtaagacagtagttcagaatcaaaagaccagcatttcatacagaaataagaattct

SEQ ID NO: 54666 - DNA, 201 bp, Homo sapiens
gaggcaggagaattgcctgaacccaggaggcagaggttgcagtgagccgagatcatgccattgcactccagcctgggcaacaagagcaaaactccatctcaaaaaaaaaaaaaaaaaaagaatatatttgctatatatgtgtgtatagatatacacacacatatacatatatatactcatatacacacacatgcatttttt

SEQ ID NO: 54667 - DNA, 201 bp, Homo sapiens
ttggaaaacgacatgagggctagattctgttatttgtagacttttttatgcaaaaataatttgagcttagtcatgcttttatacaagtaatgtatttttgktttatttttataatatatatcagaagaaaagggacagacatgatgttcatgcctgtaatcccaacactttgggaggccgaggcaggagaaccacttaagg

SEQ ID NO: 54668 - DNA, 201 bp, Homo sapiens
tcctgattttggttcttttggatatacccaaaagtgggattgctgcgtcatgtggtagttttatttttaattttttgagcaccctttatactgtttcccayagtggctgcaccatttcacattcccaccaatagcgtacaagagttccagtttctccacattcttgccaatacttgatatctttcatggttttgataattg

SEQ ID NO: 54669 - DNA, 201 bp, Homo sapiens
cctttgtaataaataggtagatgtaagtaaagtatttccctgagttttgtgagccactctagcaaattaatagaatccaaggagggggtcttgagaacccyaatttagagctgaccggtcagaagcacaggtcacaacctgaggcttaccattgacatctgaaatgggggcagtctcaaggagctgagtccttaacctgtg

SEQ ID NO: 54670 - DNA, 201 bp, Homo sapiens
actccaacctccgccttccagtttcaagcaattctcctgcctcagcatcccaagtagctaggattacaggtgcccaccaccacacccagctaattttcatrtttttagtggagacagggtttcaccatgttggtccggctggtctcaaactcctgacctcgtaatcggcccacctcggcctcccaagtgctgggattacag

SEQ ID NO: 54671 - DNA, 201 bp, Homo sapiens
ttttttaatttatttttaattgacaaataaaaattatacatatttatagtgtatgacatgatgttttgatacatcttttttttttttttttttttttttgrgacaggatctggctctgtcacccagtctggagtgcagtggtgcaacctcggctcactacaacctttgcctactgagcttaagccatcctcctacctcagt

SEQ ID NO: 54672 - DNA, 201 bp, Homo sapiens
aatttttgttattttttgtagagacggggtttcgccatgtttcccaggctggtctcaaactcctgagctcaagcaatctgcccaccttggcctcccaaagkgctgagattactggcgtgagcccctgcacccagccttgatacatctttttatattgtgaatccattaacaaattattgtagttacagttttttggttttg

SEQ ID NO: 54673 - DNA, 201 bp, Homo sapiens
cctaactccacattcagtgatgtcgggttgttagcttgaatagcccggtgtgaatagttacatcacagacattctcaaatactacaaactggggagctttyttcttcctggatagctggttgttaaacatttatcagtattccactggaggtgttcatgatcttgattgtaatgatgattttacaggtgtatgcacacatt

SEQ ID NO: 54674 - DNA, 201 bp, Homo sapiens
gaaaagttcaagattgggcatctggtgaggccatttatggtaggaggtgaaggggagctggaatatgcagagatctcatggcaagagaggaagccagagasggaggtgcaaggctctgtttaacaattacctctcatgggaactaacagagtgagaacacagtcacccccaatggagggcattaacttactcatgagagat

SEQ ID NO: 54675 - DNA, 201 bp, Homo sapiens
aagtttttttaaaaagcaaatttaggccaggcgtggtgaggctcatgcctgtaattgcagcactttgggaggctgaggtgggaggatcgcttgagttcagkagtttgagaccagcctgggcagcatggtgaaaccccatctctacaaaaattgaaaaattagccaggcatggcaaaacatgtctgtagtcccagctacttg

SEQ ID NO: 54676 - DNA, 201 bp, Homo sapiens
agagacataaaaaatgagagaaaggatttcaacatagcaaattaaaagttaaaaacaaagcaaattaaaagtttttttaaaaagcaaatttaggccaggcrtggtgaggctcatgcctgtaattgcagcactttgggaggctgaggtgggaggatcgcttgagttcaggagtttgagaccagcctgggcagcatggtgaaa

SEQ ID NO: 54677 - DNA, 201 bp, Homo sapiens
tacagtgactggattaatattgaatttctgaattaataaaacaacttcctaatggaaatttttcagggggaaaattgtttgacatcaaaaggcaccaccamccaacctcaagaacaaaagagtaaacataaacacataaataacactttcctagaactaacagttataggttaattaatagctcttgaagataaatgactt

SEQ ID NO: 54678 - DNA, 201 bp, Homo sapiens
caacaagagcaaaactccatctcaaaaaaaaaaaaaaaaaaagaatatatttgctatatatgtgtgtatagatatacacacacatatacatatatatactcatatacacacacatgcatttttttcttcttaatcattctctattaatgtttccagttcttcaaatcacctgaatattcatcttcatcttgaatctttaag

SEQ ID NO: 54679 - DNA, 201 bp, Homo sapiens
ggtgaaaccccgtctctactaaaaatacaaaaaattagccaggcgcggtggcgggggcctgtaatcccagctactcaggaggctgaggcagaagaatggcrtgaacccgggaggaggagcttgcagtgagccgagatagcgccactgcagtccggcctgggtgaaagagcgagactccgtctcaaaaacaaaaaaaaaaga

SEQ ID NO: 54680 - DNA, 201 bp, Homo sapiens
aatcgcttgaacccaggaggtggaggttgcagtgagccgagatcacgccattgcactccagtttgggcaacaagagtgaaactccaactcaaaaaaaagaraaaagaaaagaaagaaactgctagaatacaacccctgaaccctttgatgctcctggggactcctgcaactccacccgtctcccagaagctgtcatttcct

SEQ ID NO: 54681 - DNA, 201 bp, Homo sapiens
agcttgcagtgagccgagatcgcgccactgcttccagcctgggtgacagagcgagactccgtctcaaaaacaaaaaaaaacaaaaaacgctggatctcaamgtttagataagtttccctggttgacaatactacttacgtgttgtcacacatcactgctggaaaagttaagcactatctatacaactccactgagagagaa

SEQ ID NO: 54682 - DNA, 201 bp, Homo sapiens
aggaaccctataccacaaataattaacagcaaatcaaaaaaagttacaaagtttcccctgaggggaatcagtccttgaggaagcctgctagacaatccccacaacaacactgaaagtggacacattttttttcatccactttcaaattttagataatttttcttaatgtatcttagagaaaatacgaagtgtgagacttta

SEQ ID NO: 54683 - DNA, 201 bp, Homo sapiens
ggaaccctataccacaaataattaacagcaaatcaaaaaaagttacaaagtttcccctgaggggaatcagtccttgaggaagcctgctagacaatccccacaacaacactgaaagtggacacattttttttcatccactttcaaattttagataatttttcttaatgtatcttagagaaaatacgaagtgtgagactttaa

SEQ ID NO: 54684 - DNA, 201 bp, Homo sapiens
gaaccctataccacaaataattaacagcaaatcaaaaaaagttacaaagtttcccctgaggggaatcagtccttgaggaagcctgctagacaatccccacaacaacactgaaagtggacacattttttttcatccactttcaaattttagataatttttcttaatgtatcttagagaaaatacgaagtgtgagactttaat

SEQ ID NO: 54685 - DNA, 201 bp, Homo sapiens
aacagcaaatcaaaaaaagttacaaagtttcccctgaggggaatcagtccttgaggaagcctgctagacaatccccacaacaacactgaaagtggacacattttttttcatccactttcaaattttagataatttttcttaatgtatcttagagaaaatacgaagtgtgagactttaatgagctgtggcaggaatacaata

SEQ ID NO: 54686 - DNA, 201 bp, Homo sapiens
taaccaacatggtgaaactccatctctactaaaaatataaaactagccgggcgtggtggtgcatgcctgtaatcccagctacttgggaggcttgaacctgygagacagagtttgcagtgagccgagatcgtgccatcgcactctagcctgggcaacaagagcaaaactccatctcggaaaaaaaaaaaaaaaagtgcccag

SEQ ID NO: 54687 - DNA, 201 bp, Homo sapiens
tggagggagcagggtcccaaggttgtacagggtagtggggcccagggcctggcccacaaaaccattcagtcctgctatgcctctgggcctgtgatggaagyggctgcgaaagtctctgaaatgccttcaagacctcttgcccattgtcttggctgttagtacttggctcctctttacttatgcaaacttctgcagcctgct

SEQ ID NO: 54688 - DNA, 201 bp, Homo sapiens
tttattgaagaattttttttaacagtacaattgcattcaacaacgtggccttgattttgtgctctgctctccaatgcaaccacataggttgagtgccatcygtatttcacccagccaaaactcttgaaattttgccaacaacatgacattgtcattactgcatatagccctttggggaccagtaggaatccaatctggtaa

SEQ ID NO: 54689 - DNA, 201 bp, Homo sapiens
tttgatatacctatacattgtgaaatgatttgcacaattaagctaattaacgtatccattatctcacagttaccttttcctttgatttttcttgtgtgtgkgtgtgtgtgtgtgtgtgtgtgtgtgtgtgtgtgtgttgagaatactcaagctctatcttagcaaatttcaagtatacaatatagtattattgaccatagt

SEQ ID NO: 54690 - DNA, 201 bp, Homo sapiens
atataggaatgctcagtaaaagttagtttaattattatttgacaaaggagtttctatggccatgttttgcaaattttcaatcttttgatctctgtattcamtagtgatacttctactatgatgtgctccataaacttaagtagaaatttttctactttaagatgattccaaaagttgtgtctctatttcttccacttcagt

SEQ ID NO: 54691 - DNA, 201 bp, Homo sapiens
ttgttttgagtgagtggtttcattcctttaccgtagcgatttttttttggttttattattattattattattattattttttgagacagagtcttgctccrtcacccaggctggagtgcagtggcacgatcttaacccactgcaacctccacctccctggttcaagagattctcctgcctcagcctcccgagtagctggga

SEQ ID NO: 54692 - DNA, 201 bp, Homo sapiens
tagagacagggtttcaccatgttggccaggctggtctcgaactcctgacctcaggcgatctgcccgcctcgggctcccaaagtgctggaattataggtgtragccaccgtgcccagtcaatatctggctaatttttaaattttttgtaaagatagagtctcactctattgaccagggtagtctcaaactcccggtctcaag

SEQ ID NO: 54693 - DNA, 201 bp, Homo sapiens
atcactgagtactccaaataaccacaggatagttgccagggctgccaactatgtgattggagggttaaaactttcagccccacccccacctctaggaagcrgagaggggttaaaggttgatttggtcatcaaagaccaatcatacctacctaatgaagtatgtgtgtattacacatatatatgtataatttccttgtccat

SEQ ID NO: 54694 - DNA, 201 bp, Homo sapiens
tgacagacatttagattgtttctgtatcttcgctatcatgaaaaatgctgctgcaatgaacatgggagtccagatatccacctttttcaagatcctgattktggttcttttggatatacccaaaagtgggattgctgcgtcatgtggtagttttatttttaattttttgagcaccctttatactgtttcccacagtggctg

SEQ ID NO: 54695 - DNA, 201 bp, Homo sapiens
cattggcattttcataggaattgcattaaatctatagatcactttcagtaatatagacaagtttccaatattgattcttctgatccataaacatgaaatayctatttatttgtgtcttcttcaattttattcattaattcattatgtttcatagttttcagtatacagatatttcacctttttggttaaatttatttctaa

SEQ ID NO: 54696 - DNA, 201 bp, Homo sapiens
gtttattctaggttatccaatttgttgttatataattattcatagtagtctcctatgatccttgtatttccttcttttttttttttttttttttttttttkgacagagtctcaccctattgcccaggctggaatgcagtggcgcgatctcagctcactgcaccctctgcctcttaggttcagattattcttgtgccttagc

SEQ ID NO: 54697 - DNA, 201 bp, Homo sapiens
gcaggattcttctttgaaaaagatcatacctataattagaacaaatctccaagatcattttctttgatttcataaaatcctgcatctttgcaaggtttgcmacctcactttgccattagattattccatatatttactggataagaggctgatcctccaagacttaaaggagaggactagtgtttagcaaaaaagaagtct

SEQ ID NO: 54698 - DNA, 201 bp, Homo sapiens
atgcagtggcgcgatctcagctcactgcaccctctgcctcttaggttcagattattcttgtgccttagcctcctgagtagctgggacaacaggcgcacacractatgcccagataatttttgtatttttagcagagacggggttttgccatgttggccaggctgatctcgaactcctgaccttaagtgatccacccacctt

SEQ ID NO: 54699 - DNA, 201 bp, Homo sapiens
agtcatctctcttttgttcttaggctagctaaaggtttgtcaattttgtttatgtcttcaaaaaagttttgttgatcttttctattcttttcctagtctcttttttttttcctgctctgatctgtattatttcgtttcttctactaacattgggcttagtttgttcttcttttttgagttccttaaggaataatgttagat

SEQ ID NO: 54700 - DNA, 201 bp, Homo sapiens
ctattattgtcttgctgtctacttctcccttcagacctattaatattttctttatgtatttatgttctccaatgttgggtacataatagtgtgtgtgtgtgcgtgtgtgtgtgtgtgtattatatattgttccatattacctattgttctatcatcttgatgaattgatctctttatcacgatataatggcactgtatgtc

SEQ ID NO: 54701 - DNA, 201 bp, Homo sapiens
atcatgccctcccaacagtccttcaaagtcttaactcattccagcattaactcaaaagtccacagtctcatccgagacaaagcaagtcccttccacctacragcctgtaaaataaaaaacaagttagtcactcctaatataggcattgggtaaatactcctgttccataagggagaaattggccaaaataaagggaccaca

SEQ ID NO: 54702 - DNA, 201 bp, Homo sapiens
tacctcagcatcccaaatagcaggacttcagttacacaccacaatatctggctaattttttttttgagggcgggaggcggtaacaaagtctcactcttgtygcccaggctggagtgcaatggcatgatctcggctcactgcaacctccgcctcccaggttcaagcgattctcctgcctcagcctcccaaatagctgggatt

SEQ ID NO: 54703 - DNA, 201 bp, Homo sapiens
catcccaaatagcaggacttcagttacacaccacaatatctggctaattttttttttgagggcgggaggcggtaacaaagtctcactcttgttgcccaggytggagtgcaatggcatgatctcggctcactgcaacctccgcctcccaggttcaagcgattctcctgcctcagcctcccaaatagctgggattacaggtgc

SEQ ID NO: 54704 - DNA, 201 bp, Homo sapiens
ctcactcttgttgcccaggctggagtgcaatggcatgatctcggctcactgcaacctccgcctcccaggttcaagcgattctcctgcctcagcctcccaartagctgggattacaggtgcctgctaccacgtccagctaatttttgtattttttagtagagacagggtttcaccatgttggccaggctggtctcgaactcc

SEQ ID NO: 54705 - DNA, 201 bp, Homo sapiens
tgctaccacgtccagctaatttttgtattttttagtagagacagggtttcaccatgttggccaggctggtctcgaactcctgacctcaggcgatctgcccrcctcgggctcccaaagtgctggaattataggtgtgagccaccgtgcccagtcaatatctggctaatttttaaattttttgtaaagatagagtctcactct

SEQ ID NO: 54706 - DNA, 201 bp, Homo sapiens
gtagagagggtgaatttgaaagcttatattaagatcgaaaccaaagtttatgaaagtaagttcacttctattctcaacaaaatgtaggttacaattgcaartttattaactcagaagaaacagtgaatcagtgttgattttttttaaatatgcttgacaaaattacataccacaacatgacatcctctatttcacaaaagt

SEQ ID NO: 54707 - DNA, 201 bp, Homo sapiens
taaaattatggttatttattttagagaaggagtctcacagtgtcatccaggctggagtgcagtggcacgattacagctcactgcagaactcctgggcttaygcagtcctcctacctcagcatcccaaatagcaggacttcagttacacaccacaatatctggctaattttttttttgagggcgggaggcggtaacaaagtc

SEQ ID NO: 54708 - DNA, 201 bp, Homo sapiens
attttgagttctaactctaaggaacacattttgcacaggtttatatatatgttaaatgcatttttcttggtgcaaagtcatcaaaagtacatactaacagrgctttcttctattacataaacatctgccatttacaataaacaagggaagtattaaaataagagacagaagatggttttcttcaatttatgtaatctgtgt

SEQ ID NO: 54709 - DNA, 201 bp, Homo sapiens
tactagaatggccagtggaaatgaattccgtataatgggcgacaaaggagacctctgttccttcgtgtgccctcaatgtggtcagctgggacccaggcacmgtgaatagttaaggctgtgagctggtgctggtgccacgatgagtggcccaccttcactgagaatgaaagatgggtagattctgcctgtaccaaaggtggt

SEQ ID NO: 54710 - DNA, 201 bp, Homo sapiens
aactgactcagataagtgatggtttgagataagcctagataggtaaataggacatgacagaactttagtcttgtttttcctagaaggatatagaaaatcaytgaagcaatttagacgaggaagtaatactagaacaggcaatacaacatctcaaattcattttgagttctaactctaaggaacacattttgcacaggttta

SEQ ID NO: 54711 - DNA, 201 bp, Homo sapiens
gtctgacataagtgtggctactcctcctctcttttggtttccttttgtatgggatgtctttttatatctctttactttcagttcacgtttattcttgaagytgaagtgagtgttttgtaagcagcatagagttgagtcttttttctatcctttcagccattccatgtcttttgatcagtgagtttaatttatttaatgtaa

SEQ ID NO: 54712 - DNA, 201 bp, Homo sapiens
gaggtaggtggtcaggcgatgctgttgtctgcacaggtatcgagtcacctgctggatttgtgatgctatgcacaactccacaaggacttaagaggcatgcmtgtgttatctcagatggaaggtgggagttggccaccttgatgagactggtggatgcgccaggctgggggtgtgagaacctgagggagtatggcccaataa

SEQ ID NO: 54713 - DNA, 201 bp, Homo sapiens
gtggagccacacagaggtggcattcaggagcagagtgaataagcaaaggctgcggaaagcaggctttgtagtatcaagagggcgtagtggctagtggttcycccaggaggatgcaattggcttgtttaaataattctgtgggctggcagaaaactgaaatctgctactcacggataagcaagcacagtgcctgaccccttg

SEQ ID NO: 54714 - DNA, 201 bp, Homo sapiens
tgagacagtgcgggagaggaccttgcctgcctgctgaggggctggaacctcgctgggagccagggatgagaggcagcagtcaggagaggcttggggagctytgcattggtggtgtgggggggtggggggtcccggagggggaggcgtggaagtgggaggggcctgcaggggggcacccaacagcgaggctggcttggcagg

SEQ ID NO: 54715 - DNA, 201 bp, Homo sapiens
tcatctgatctagtctatcagtgtcgagaagtgggaagggctgagcttattatatcctacgtgcaagccagcaggtgagtctgccagtttcctgtttgctrgcagaagacaggagattcctggttcaaagataaatgactttattactcatgctacagcaagcagcatgaagaaaggttacttgtgttggttctctttgcc

SEQ ID NO: 54716 - DNA, 201 bp, Homo sapiens
gcctcacacggcagactgtccacagaaagcaatctcgcatggcggtgactgtcccccaatctttgcttctttcctgtcacccagggggacagcggggggcycctggtgtgtcaagagaggaggctgtggaagttagtgggagcgaccagctttggcatcggctgcgcagaggtgaacaagcctggggtgtacacccgtgtc

SEQ ID NO: 54717 - DNA, 201 bp, Homo sapiens
acctcctggtccccagctgagatgtccattactatgaccctggtggagaaggtggagagacggagaggatgcgtgagttcctcgtggccagaattcaggcrtgtggtccttctaccctcccacacctgtatgaggtgttcaccttctctttcccttcatttttcactacgtgctgtcaatcgatttaataaatagcaggtt

SEQ ID NO: 54718 - DNA, 201 bp, Homo sapiens
gaagaacagagttgggccgtaacagtggtatctgttacctgcaaccaaggagccctggcccatgcagattattacagagtgctgtcaccactgtgtgagayaaggcaattctgctgtgggaggcaagaaaacaaagtggattttgggaaactggaggtatgtcaggtgcatatgggggcacacattcataaggagtattca

SEQ ID NO: 54719 - DNA, 201 bp, Homo sapiens
cagtggagattattgtctcagaggatccccgggcctccttaggcaaatgttatctaacgctctttaagcaaacagagcctgccctataaaatccggggctmgggcggcctctcatccctgactcggggtcgcctttggagcagagaggaggcaatggccaccatggagaacaaggtgatctgcgccctggtcctggtgtcc

SEQ ID NO: 54720 - DNA, 201 bp, Homo sapiens
gtaggcttagactccagcacagtcacggggtggaagcagatttatggacagagacaggaaagtgaggcacagaaaatggatatgaggcacaaaaacagccsgactggttacagctccgcctttgcctcacttgaacgcagttcggactgttggctgcatttgattggtcagaactcggtgactggcacctcagttcggaca

SEQ ID NO: 54721 - DNA, 201 bp, Homo sapiens
ttcagctgaattacatttaaagaagtttaattgagcaaagaactattcacgaatcgggtagcctgctgagtcagagtaggcttagactccagcacagtcayggggtggaagcagatttatggacagagacaggaaagtgaggcacagaaaatggatatgaggcacaaaaacagcccgactggttacagctccgcctttgcc

SEQ ID NO: 54722 - DNA, 201 bp, Homo sapiens
tgagtgtgaccaatgtactgtcatgtgacaggcactctgggtgtgtctggggaatgaaagcaggcaagcaagaaggggggtggggaggaaaagaggaaggsagggagggagggaggaaggaagggagggagggaggaagagagggagggtaaaaggaagaaaaacagaaattaagatagaaatttatccttctttgtttac

SEQ ID NO: 54723 - DNA, 201 bp, Homo sapiens
gtgtgaccaatgtactgtcatgtgacaggcactctgggtgtgtctggggaatgaaagcaggcaagcaagaaggggggtggggaggaaaagaggaagggagrgagggagggaggaaggaagggagggagggaggaagagagggagggtaaaaggaagaaaaacagaaattaagatagaaatttatccttctttgtttacgaa

SEQ ID NO: 54724 - DNA, 201 bp, Homo sapiens
atgtactgtcatgtgacaggcactctgggtgtgtctggggaatgaaagcaggcaagcaagaaggggggtggggaggaaaagaggaagggagggagggaggraggaaggaagggagggagggaggaagagagggagggtaaaaggaagaaaaacagaaattaagatagaaatttatccttctttgtttacgaagtattttag

SEQ ID NO: 54725 - DNA, 201 bp, Homo sapiens
catcaatcactttctttgttagtaggaagaggattcattttccgtggctgccgtgacaaattatcacagtctgcgtggcttaaaacgatggaaattggccrggtgtgttccctcacacctgtagtcccagcattttgggaggccgagtctatgggatcccttgaggccattagtttgagaccagcctgggcaacatagaga

SEQ ID NO: 54726 - DNA, 201 bp, Homo sapiens
agcgctcctcgtcctggggctatgtgccctggcggggagtgagaaaccctgtaagtgaaggagagggtctttttatgtgctttctttatttctcttaaagaaaaaaaaaaagcacaaccataaattaacttgagagggggaatggctataaaggcatctggcaatgtgtgttgttcacatgggatttgccactgctcagga

SEQ ID NO: 54727 - DNA, 201 bp, Homo sapiens
aaacaaaaaaaaagtggagatttatttccacacgcagttgaggtgtctgtagggtggttttcctggaggctctgacccctttcctttgggttctggtggcrgcggctgcagctgcactggcattcctgggcttgtagctggatctccagcctcagcctccttcctcccgtggctttgccccctgtgtctctgtatctcaaa

SEQ ID NO: 54728 - DNA, 201 bp, Homo sapiens
catgttgcccaggatggtcttgaactcctgagctcaagcaatctgcccgcctcggcttcctaaagtgctgggattataggtatgagccaccatgcctggcttttttttttttttccttttaaactaatataacaatttcagcaaagccctatcggcttctcaggaggaaaccgcattgcttaaatatgggcaagataagac

SEQ ID NO: 54729 - DNA, 201 bp, Homo sapiens
ccaccccctcccaaagcaaggtaatcttccagggaatcttcctgggccagcagctggcaacccaggacccagcttcacaggcggagcccagagcaggggcyggaggaggcccagttgctagtctagggttagcctgggtgggttagtctcgagctagccccggttggttagtctggggctagcccaggttggttagtctag

SEQ ID NO: 54730 - DNA, 201 bp, Homo sapiens
ccgctcacaacggttccatgacggggccacctcagcccctcccatgtcagcaccgtcctgggccacagagcctgtgaccctccctgtactacagcggagaygacctgcatgaggcccccccagctaacaagggcagagtgtgcctcacatcagatccccgacgtggccccagtgtgactgcacagcagaatcaacagatct

SEQ ID NO: 54731 - DNA, 201 bp, Homo sapiens
ctccaacccaccagtgcatgcgagagatgcgcagcctcagacacgccctttcccaagtccctcttcagacgtcctaggggagacccagaagagacttcctytcctgggaggctttccagcaggcccgctgtgcgtttcagttgtccattgtgaggaaagtcaacgtgagggcctttggaagactcactgtcttgcggggaa

SEQ ID NO: 54732 - DNA, 201 bp, Homo sapiens
cttggcattcttctgtcggaacaggttgctcagcagatcagcatcagctcgtgtcatacacagaactcaaaagtagagcaaggccaggcaaagtagtgggwgtgagcggtggccggagggagtgagcagtggccggagggagtgagcggtggccggagggagtgagtggtggccagagggtgtgagtggtggccggaggga

SEQ ID NO: 54733 - DNA, 201 bp, Homo sapiens
gcgtttcagttgtccattgtgaggaaagtcaacgtgagggcctttggaagactcactgtcttgcggggaagtgtcccgtgtgctagttggtggcatgcccrtggcctcatcttcattttcatccagcacttttctctatctagttgggggtttaaaacaaaattgttgtgactcaaaccagaactcaggaacatagtgccg

SEQ ID NO: 54734 - DNA, 201 bp, Homo sapiens
tgggtgtgaccctgtgtgtgcccagccccagacctgcacgtggccggttttccacgctggcagcctggcatgacccaactctctgtccagggcaggaagargtatcaccgagcagggagagagtcaccctggcccggaagcctcgcctgcacagggcacagctgcctcttgcctcctcttcgcctccacggtggaagggct

SEQ ID NO: 54735 - DNA, 201 bp, Homo sapiens
agtgaagccttctagggttctttgggagtgagttttatgttagtgcacgggatcaggacccaagttgtaacgccgacgagtgctcaaaggaaggttgtgtrtgtgtcgtgcacctgtgtgcgtggaaccaggcacgtcctctggagaaggaggattcatccccaagattgttgctgggaggcttgctgggccccgcaggga

SEQ ID NO: 54736 - DNA, 201 bp, Homo sapiens
ttacggagacatcgaaggcccctttgcgccctaccccgccgccttttcctgcttcctccttcctagacagacccatcatgctgaagtcagtgtctcgttcytgtctacactgtcatcattttgttcatctggatgcagttccaacagtatatcacattgtttcacatagtttggaaatctacattataaatgatatcctac

SEQ ID NO: 54737 - DNA, 201 bp, Homo sapiens
gcagagtgtgcctcacatcagatccccgacgtggccccagtgtgactgcacagcagaatcaacagatctcaaacttaggggtgcagaagcctctctcaggmtgtttgttaaatgtgaagattgcagggcgtttatctggagtctgattgggaggtctggggtgaagaccctggtgaatgtgttgcatgggggcttcagggc

SEQ ID NO: 54738 - DNA, 201 bp, Homo sapiens
acctctcagatgtgcaaggaagttttagcttttcttttccatctatggtatgtctgatcttacactctctgtctgctaattacaggtaaaaatgagctaamtttatttagtccaattcctcttaaaattcagtttgtcataataatttgcacagcttctgtcagtcacagtctttgggaacgcattgctcagtctcttacc

SEQ ID NO: 54739 - DNA, 201 bp, Homo sapiens
ctgtactacagcggagacgacctgcatgaggcccccccagctaacaagggcagagtgtgcctcacatcagatccccgacgtggccccagtgtgactgcacrgcagaatcaacagatctcaaacttaggggtgcagaagcctctctcaggatgtttgttaaatgtgaagattgcagggcgtttatctggagtctgattggga

SEQ ID NO: 54740 - DNA, 201 bp, Homo sapiens
ctggctgtccaccatccgttctttcttacctaacttgcactctacgaaggaagggggagaaagaattcactttcccagcccctcttttagccagaagtggycgtgcaattctatgtggcccatgagacatagggggcatctccttgaaggtggggcaggcttctcccttgatgaatgaagagcgccctctggcttcctagg

SEQ ID NO: 54741 - DNA, 201 bp, Homo sapiens
aaggacatcaaatgctgaatgtgcctcaggcgttaattcccgttttgctctcactgattttgtgctttaaatgagaaactaaagaatggtgcccacgggcwcagggtgaggcctgggactgagacctgggctagcttcacctccagcactgccgccctgcagccctgagcaccccctcggggcgtggtgagggctgtgctc

SEQ ID NO: 54742 - DNA, 201 bp, Homo sapiens
atgcgtgagttcctcgtggccagaattcaggcatgtggtccttctaccctcccacacctgtatgaggtgttcaccttctctttcccttcatttttcactaygtgctgtcaatcgatttaataaatagcaggtttcacaccttaatttggtctatgcacacctctgttctgccactggctatgtactcggaggccacagttg

SEQ ID NO: 54743 - DNA, 201 bp, Homo sapiens
caggacccgcgcatggaggggaaacctgagacggtggaggaggaagaaggaggcttagggcttcgctgggaccctggcagctgcgtgctggcaggtgaacrcggcgcctttctcatgtgggcgccggggaaacatttgctggcttgatctcagatgaagtctctccttgggatggtttcaaacacaggaggtcctcactta

SEQ ID NO: 54744 - DNA, 201 bp, Homo sapiens
gcttgttggacaaacagaggggagattataaaacatacccggcagtggacaccatgcattctgcaagccaccctggggtgcagctgagctagacatgggayggcgagacgcccagctcctggcagcgctcctcgtcctggggctatgtgccctggcggggagtgagaaaccctgtaagtgaaggagagggtctttttatgt

SEQ ID NO: 54745 - DNA, 201 bp, Homo sapiens
gcggccactcgtaggagggcaagctcgggcttgaggtgcttcgagacagtgggagtctgctcgtcccacccgcagggccctgtccttttccgctgttgcgwcacaccagagagcatccccctcgtccctcgttccctcacccccctggtctcagcatgcgccttctgtgttttgggccgggcttccttctcacacacatcc

SEQ ID NO: 54746 - DNA, 201 bp, Homo sapiens
agttccaacgataattttagagccttcgtgggctgtgtgctttgtctggtgccaccttctccctgttggtgccaccttctccctgttggtgccacctggakgcagaaagagcttcttgaggccagaccagctggggcctctaggtggtggaagagagtcatccatctgtagggacaaagagcactttcctgtccaggagcc

SEQ ID NO: 54747 - DNA, 201 bp, Homo sapiens
gcagataaagaggcctgagaggccgggagacacccaccaagaagaaccatcaggaacgggaagccccctgccccctgcacacagcagcacacacatgagcygtaataatacatatgtcacgtatgtgtcaggggggccacagacacctcctcttacctctcagatgtgcaaggaagttttagcttttcttttccatctatg

SEQ ID NO: 54748 - DNA, 201 bp, Homo sapiens
gagctctgggagcaggggcagtgagggtggggagagaggagcaggtgcatggtggtgacaccatgtcccccaaagaagtctgcagggtggacccacaagcytttgttcccctccatagcctgtggtcatagaaggggctacagctcacgcatcgtgggtggaaacatgtccttgctctcgcagtggccctggcaggccagc

SEQ ID NO: 54749 - DNA, 201 bp, Homo sapiens
ccccaagctaaatgcaccctgggttcctcctcctcccacctgtccctccatctggtgctcttgtgctgggcacacgttgcacagttatactggagatgggrtcccccgggagctctggaaagctcctgctctctgcagccagacggttccagggaggaagagggaggtgcagaactgagcggggccagctctttccacatt

SEQ ID NO: 54750 - DNA, 201 bp, Homo sapiens
tttccccccggcttctcttcacatctctaaccaaaagcctgggaagagccactgttggtaacgctttctagcttgcctaggatagagggggaaggcatgasgaaatctgaagacatttcatgtattcttttttttttttttttttgaaatggagtctcgctccgttgcccctgagctggagtgcaatggtgcgatcttggc

SEQ ID NO: 54751 - DNA, 201 bp, Homo sapiens
tcttcctcctctagatccctttcctcactgccctgcttcaagctgtttcacagcttgtaccctctgtcggctcctcctagaccaccccacccggtcctctyaccttacctgcaatgggtttccacctcctgaacacacctgggtctctggaatggcctttgcccatgcggctccatcttcacctggtgaacctcctcctgc

SEQ ID NO: 54752 - DNA, 201 bp, Homo sapiens
tcggggctgttttcctgtgttaggaagactatacaatcctcccaagtgtcatgtttcaaagaggaagtgttggcgtggggtctcagaatagtgcttttgastgttcatgccaacatctcccccaggggcagaccctcccaaggcccatccagataggcccaaatgccggtcccagtgatggccacctgggagaccctctcc

SEQ ID NO: 54753 - DNA, 201 bp, Homo sapiens
tgagatgtccattactatgaccctggtggagaaggtggagagacggagaggatgcgtgagttcctcgtggccagaattcaggcatgtggtccttctacccwcccacacctgtatgaggtgttcaccttctctttcccttcatttttcactacgtgctgtcaatcgatttaataaatagcaggtttcacaccttaatttggt

SEQ ID NO: 54754 - DNA, 201 bp, Homo sapiens
gtgctgttctaggcccttaaaagtatatccaatttacaggatcggcaaaagcaggtggagagtaactcagggtggcagggcccccggagaccttcgagaartgcgacgaggagggggctgccttcagtcggggctgttttcctgtgttaggaagactatacaatcctcccaagtgtcatgtttcaaagaggaagtgttggc

SEQ ID NO: 54755 - DNA, 201 bp, Homo sapiens
gagcacctgttttgtgccaggtgctgttctaggcccttaaaagtatatccaatttacaggatcggcaaaagcaggtggagagtaactcagggtggcagggyccccggagaccttcgagaagtgcgacgaggagggggctgccttcagtcggggctgttttcctgtgttaggaagactatacaatcctcccaagtgtcatgt

SEQ ID NO: 54756 - DNA, 201 bp, Homo sapiens
aaaaacccatacagtgtatttttcatttcagatgttgtattttttatttctaaaatttgtacctggttaatttttagtttccatttatctactgagattcytttttgttcctttattatattatgtttttctttcaatctttgaacattttatgccatgtctaagtctgtttttgttcactgatttttctaatgattatgg

SEQ ID NO: 54757 - DNA, 201 bp, Homo sapiens
ttcttctgtcggaacaggttgctcagcagatcagcatcagctcgtgtcatacacagaactcaaaagtagagcaaggccaggcaaagtagtgggtgtgagcrgtggccggagggagtgagcagtggccggagggagtgagcggtggccggagggagtgagtggtggccagagggtgtgagtggtggccggagggagtgagcc

SEQ ID NO: 54758 - DNA, 201 bp, Homo sapiens
gaaagggacaggctgcacaaaggtcggcagatgacagcagggcagggactccggacatggcgcccttcccagcctgcatctccaaggaggatggtttttgyatgagggtgaagacttggggctcaaagtcaatgtccagcccccagtctgagcccatgtgatggggacgtggccaccaagtacagttgtggaggttgtgaa

SEQ ID NO: 54759 - DNA, 201 bp, Homo sapiens
gctcagcagatcagcatcagctcgtgtcatacacagaactcaaaagtagagcaaggccaggcaaagtagtgggtgtgagcggtggccggagggagtgagcrgtggccggagggagtgagcggtggccggagggagtgagtggtggccagagggtgtgagtggtggccggagggagtgagccctgtacagagggagttagca

SEQ ID NO: 54760 - DNA, 201 bp, Homo sapiens
ttgggaggctgaggcgggcagatcacctgaggtcaggagttcgagacctgcctgaccaacatggagaaaccccatctactaaaaatacaaaatttcccgcrtgtggtggcacattcccataatcccagctactcggagactgaggcaggagaattgcttgaacccgggaagcggaggttgtcgtgagctgagattgtgcca

SEQ ID NO: 54761 - DNA, 201 bp, Homo sapiens
gcatcagctcgtgtcatacacagaactcaaaagtagagcaaggccaggcaaagtagtgggtgtgagcggtggccggagggagtgagcagtggccggagggwgtgagcggtggccggagggagtgagtggtggccagagggtgtgagtggtggccggagggagtgagccctgtacagagggagttagcagtggccggagggt

SEQ ID NO: 54762 - DNA, 201 bp, Homo sapiens
tggtggtgtgggggggtggggggtcccggagggggaggcgtggaagtgggaggggcctgcaggggggcacccaacagcgaggctggcttggcaggacccgsgcatggaggggaaacctgagacggtggaggaggaagaaggaggcttagggcttcgctgggaccctggcagctgcgtgctggcaggtgaacacggcgcctt

SEQ ID NO: 54763 - DNA, 201 bp, Homo sapiens
tttgttcatctggatgcagttccaacagtatatcacattgtttcacatagtttggaaatctacattataaatgatatcctactttacaaaccattttaacrgattttttcacttcgctttgttttcaatatttctcattatttattcattttcatcttctgaaagatactcacatacatacatatataatatatgtaaagt

SEQ ID NO: 54764 - DNA, 201 bp, Homo sapiens
tttgcttaaagtcgtagtttccaagaactaacaatgacgtcaaagtaagtacgttttttttccctaattcaagtgaaatttatataacatacaattcaccwttttaaagtgaacaaccctgtagcatcagcacattcacagggctgtgcagacaccacctttgtcagttcccagcattctcatctcccaaaagacacgcgg

SEQ ID NO: 54765 - DNA, 201 bp, Homo sapiens
ctgcctgcgcccttgcccccaccccagcccccagctctgccccctgtgctgtgggatcacagaggccgtggcaaactcccctccccaccccacacaccctytggctcaaggctcagagcgtctttgcgggtcactcaggtccatgatcctgttacaactgaaatctagaaaattgtgattacagtttagtgcattcgtgtg

SEQ ID NO: 54766 - DNA, 201 bp, Homo sapiens
gcatgtgtaataaaaattgcagagggtggcatggactgacccctccaggaaaacccctccccaacctcagatctgaacgaactagaaaatagaacagcagrggagggatacagaagccaaaatgtcactttattcccactggcccctctgtagcttggcaaggattgggagagggtgtccccccaacctagtcgtccttgc

SEQ ID NO: 54767 - DNA, 201 bp, Homo sapiens
ctaacttgcactctacgaaggaagggggagaaagaattcactttcccagcccctcttttagccagaagtggccgtgcaattctatgtggcccatgagacayagggggcatctccttgaaggtggggcaggcttctcccttgatgaatgaagagcgccctctggcttcctaggccagcccttgcagcctgcctttgggtgtt

SEQ ID NO: 54768 - DNA, 201 bp, Homo sapiens
tgttaaataaacctaagtgtgcttgtgggttaaatcacttctggtttggtttcctgtggcatttcagtatattaccaaggcccatatcttccatctaccayagagcagtgagcctatggcccagccacgatggccaggaacaaccgctctcaccaaggactgtaggcagagccagttaacaaggtgggtcactgccttcct

SEQ ID NO: 54769 - DNA, 201 bp, Homo sapiens
ataaaggcatctggcaatgtgtgttgttcacatgggatttgccactgctcaggagggtggctccaagaagggcctccctcctagggaaaggctgagtgacrgcaggtgtcagcgggccccgtgtcgggccaggagggcattcccaccaagggtccttggagtcccagagcactcacctctcgcctggatcttggccttggg

SEQ ID NO: 54770 - DNA, 201 bp, Homo sapiens
agagatggaatttcaccatgttggccaggctgttcctgacctcaggtgatctgcccacctaggcctccctaagtgctgggattgtggcgtgagccactgcrcccagcctggatttttttaaacggctagatagtaaatattgtaggttttggaggccttacagtctttgtcacaatgaatcaactctgcaattgtttctga

SEQ ID NO: 54771 - DNA, 201 bp, Homo sapiens
attctcgaaggcaagctgtggcttaagttcatatttgtagggtcactgggaaagatatcgttaacttaagaaaactccctcacctttctttgcaagtagarggaggggtggtttgttgcaatatttaatttttatgagtctgataggaaacatcagctcataagaaagagacacacacctggcaaatcccagtccttgtaa

SEQ ID NO: 54772 - DNA, 201 bp, Homo sapiens
aggaggcaatggccaccatggagaacaaggtgatctgcgccctggtcctggtgtccatgctggccctcggcaccctggccgaggcccagacaggtaaggcrtgcttcttcctgctctgtggggccacagccagctctggcagcctccgccaggagccactgttttacatacatatttttgagcacctgttttgtgccaggt

SEQ ID NO: 54773 - DNA, 201 bp, Homo sapiens
agagcagcgaaaaccaccgtcactatgagcaccaccctgggcctggtgcccccgtcctgttttcaataaacttaagctgaccacagaggacaccaggcctyggcccctccctgggtcctgcggtcaggcccctcctggagaccctggcccaggagtggagaccccggtgcaggagtggcagccctggaggaggggctgggt

SEQ ID NO: 54774 - DNA, 201 bp, Homo sapiens
tagagatggttaaagtgtaggagaggatgcacgtggtttctgcgcactatgtcattttataccagggacttgagcatttgtggattttggcatccctgggkggggggtcctgaaaccagtcccccaggggtactaagggacgactgcattgtattttaagttcattttccctttccctggttaatgaatatttattttgct

SEQ ID NO: 54775 - DNA, 201 bp, Homo sapiens
cttaaattctccttaaaatccttctttaatcttctctgctctactacatcctatgtcagagatctgtgattcaaaaataaataaataaataaataaataaycaaaggacggtcaagctagattgcttgggttcaaatcccagtgtagactcaggcaagttccacacacagttcatgcctcagtttcctttcttagaaaaga

SEQ ID NO: 54776 - DNA, 201 bp, Homo sapiens
ctatattcatgggttctacatccatggattccagtaatgtcagatcaaaactgttttaaaatccagctgggcacagtggctcacacttgtaatcccagcaytttgggaggctgaggcgggtgcatcacctgaggtcaggagttcgagaccagcctggccaacatggtgaagccctgtctctactaaaaacacaaaaattag

SEQ ID NO: 54777 - DNA, 201 bp, Homo sapiens
ggattttttcacttcgctttgttttcaatatttctcattatttattcattttcatcttctgaaagatactcacatacatacatatataatatatgtaaagyataatacatgtatgcaattagttctctatattcatgggttctacatccatggattccagtaatgtcagatcaaaactgttttaaaatccagctgggcaca

SEQ ID NO: 54778 - DNA, 201 bp, Homo sapiens
gggcagatcacctgaggtcaggagttcgagacctgcctgaccaacatggagaaaccccatctactaaaaatacaaaatttcccgcgtgtggtggcacattmccataatcccagctactcggagactgaggcaggagaattgcttgaacccgggaagcggaggttgtcgtgagctgagattgtgccactgcactccagcctg

SEQ ID NO: 54779 - DNA, 201 bp, Homo sapiens
attcatatatgaagccttaaattccattacctaagaatgtgactacatttggagacagtgtcttaaaaggggtaatcaggttaaaatgaggctcttagggygggccctggttcaatttgactggtgtccttataagaaaagagtcgccagagatgtgcgtgcacagaggaaagaccatgtgagatatggggaaaaaaagcc

SEQ ID NO: 54780 - DNA, 201 bp, Homo sapiens
tcacaggtccaaactcagtctcagggcgctggcgtcaagtgtgggctgtgctggctcctcctggaggcccttggggaatctgtctcctgcctttcccagcrtctgcactctgcccacactgcttggctcgtgcccctccttggtcttccggggcagcaatgccgcatcttcgaatctctctctgactctctgactctggtc

SEQ ID NO: 54781 - DNA, 201 bp, Homo sapiens
tcagctgggtgtccttgtaaagggtccctggggtggcagttgcttttttgaccagaggcctggcaggaaacgggcttcaccacagcggatctgggcaatgygaggagagtgaagactgtaaaagtctccttgcggctggtaaaccccccaggctggggcaggggggtgaggggtctgctctggggcctggggaagatggtg

SEQ ID NO: 54782 - DNA, 201 bp, Homo sapiens
agctctgagttccggcaccagtagcaggcccgaaagaggcacccttccatctgattccagcacaaccttcaagctgctttttgttttttgtttttttgagrtggagtctcgctctgttgcccaggctggagtgcagtggcgaaatccctgctcactgcagcctccgcttccctggttcaagcgattctcttgcctcagctt

SEQ ID NO: 54783 - DNA, 201 bp, Homo sapiens
agatccctttcctcactgccctgcttcaagctgtttcacagcttgtaccctctgtcggctcctcctagaccaccccacccggtcctctcaccttacctgcratgggtttccacctcctgaacacacctgggtctctggaatggcctttgcccatgcggctccatcttcacctggtgaacctcctcctgcagggagcccccc

SEQ ID NO: 54784 - DNA, 201 bp, Homo sapiens
gagatagtctggaagaaagaactgttttaattgcctcccatgcatttcgttagtgagggagggatttcaccctaggatgatgggatgactgaacacgccawccccaacacaacataggtgagaacaatagcagtttgtgagtcccatatccttatagctcaggggctgaggacactgtgccatgtggagccacacagaggt

SEQ ID NO: 54785 - DNA, 201 bp, Homo sapiens
tgcttcagagggagacactttatccactttccaagattgtttgtgacccaaacatccttggagagatagtctggaagaaagaactgttttaattgcctccyatgcatttcgttagtgagggagggatttcaccctaggatgatgggatgactgaacacgccatccccaacacaacataggtgagaacaatagcagtttgtg

SEQ ID NO: 54786 - DNA, 201 bp, Homo sapiens
tcatgctacagcaagcagcatgaagaaaggttacttgtgttggttctctttgcctccaagacccccaagggactgggaccgggaatgggctcagatgggtrcctgcacacacagtgggttgccttataggagagaagccctggacttagggatccaagtgttttataagggacagtgagcttgcctgctctttgcttcaga

SEQ ID NO: 54787 - DNA, 201 bp, Homo sapiens
gcaggaggctgtcctctaaaatacaggagtccaggggaccaactgggaaggtgtgggagggggagggagggagccccatagacacaggggagtgaaccacrttcactttgtcagtttttgatggcagctcgtatatactatttttttctccctcctgcccccagcccctcccagaaggagacttaatctgtcgctcaggct

SEQ ID NO: 54788 - DNA, 201 bp, Homo sapiens
gcctccgccaggagccactgttttacatacatatttttgagcacctgttttgtgccaggtgctgttctaggcccttaaaagtatatccaatttacaggatsggcaaaagcaggtggagagtaactcagggtggcagggcccccggagaccttcgagaagtgcgacgaggagggggctgccttcagtcggggctgttttcct

SEQ ID NO: 54789 - DNA, 201 bp, Homo sapiens
ataagagctatgaaagagaaagctccgagcaggggaggggagtgaggcatggtacaggagagcaggaggctgtcctctaaaatacaggagtccaggggacyaactgggaaggtgtgggagggggagggagggagccccatagacacaggggagtgaaccacgttcactttgtcagtttttgatggcagctcgtatatacta

SEQ ID NO: 54790 - DNA, 201 bp, Homo sapiens
cctttctgatcgtcctgcgtccatgctcagtcctggatctcctcttccctttctgggtgtgtgtggctctggaagaagctggctaacctgacgaggttacygccctactgtcaccatggaagcatagcgcctcagccactctccctggaggagcctggcctcacactccaatcattcccctctccttctgggttaatttga

SEQ ID NO: 54791 - DNA, 201 bp, Homo sapiens
gagtggtggccagagggtgtgagtggtggctgaagggtgtgggctgtggccggagggagtgagcagtgatcagatatgggacctggacggagggtttgagyggtggctggagggtgtgggcagtggctggagggtgtgggtggtgactggagggaatgagcagtggccacaggatgtaagacctgaacggagggttggagt

SEQ ID NO: 54792 - DNA, 201 bp, Homo sapiens
agatggtgtgaggggtggtcagagggagtaagcggtggcttgagggagtgagtggtggccagagggtgtgagtggtggctgaagggtgtgggctgtggccrgagggagtgagcagtgatcagatatgggacctggacggagggtttgagcggtggctggagggtgtgggcagtggctggagggtgtgggtggtgactggag

SEQ ID NO: 54793 - DNA, 201 bp, Homo sapiens
ggagagtgtgagtggtggtcagagggagtgcacggtggccagagagcataagtggtgactggatggtatgagcggtggctggacggtgtgagccatggccrgaggttttgagtggcacccgaagggtgtggccggagggagtgagctctggctggagggagtggccagtggcaggaaggtgtgagcaatggccagatggtg

SEQ ID NO: 54794 - DNA, 201 bp, Homo sapiens
gagggtgtgagtggtggccggagggagtgagccctgtacagagggagttagcagtggccggagggtgtgagacctggatggagggtctgagtggtggccayagtgtgtgagtggtgtccggaggaagtgagtggtggctggagggtgtgagacctggatggagggtctcagtggtggcagtagtgtgtgagcagtggccgg

SEQ ID NO: 54795 - DNA, 201 bp, Homo sapiens
gggagctgcctcgcagcctcagtgccatcgaggccagggcccctgcctcctatgggattctgaaggcaattccagaatgttcttggcaaagacagcgtctwttcaataagtttatagcctccagcattgccactgcgtcatctgtgatggctctagaaacagcggctcatccctgttgcctccccaggtgttgcaacgttc

SEQ ID NO: 54796 - DNA, 201 bp, Homo sapiens
tatgggattctgaaggcaattccagaatgttcttggcaaagacagcgtcttttcaataagtttatagcctccagcattgccactgcgtcatctgtgatggytctagaaacagcggctcatccctgttgcctccccaggtgttgcaacgttcagaggcgttgcctgttttattgcaagcccatctgcatttggaggctactg

SEQ ID NO: 54797 - DNA, 201 bp, Homo sapiens
agacctgcacgtggccggttttccacgctggcagcctggcatgacccaactctctgtccagggcaggaagaggtatcaccgagcagggagagagtcacccyggcccggaagcctcgcctgcacagggcacagctgcctcttgcctcctcttcgcctccacggtggaagggctggggccacggggcagagaagaaaggttat

SEQ ID NO: 54798 - DNA, 201 bp, Homo sapiens
ttaatggatgctaacctttttaccttatttccctcagattttcttcaacaaaagaaaacattacggagacatcgaaggcccctttgcgccctaccccgccrccttttcctgcttcctccttcctagacagacccatcatgctgaagtcagtgtctcgttcctgtctacactgtcatcattttgttcatctggatgcagttc

SEQ ID NO: 54799 - DNA, 201 bp, Homo sapiens
acaacatccgtgaatctacgctgcccctcattaatggatgctaacctttttaccttatttccctcagattttcttcaacaaaagaaaacattacggagacmtcgaaggcccctttgcgccctaccccgccgccttttcctgcttcctccttcctagacagacccatcatgctgaagtcagtgtctcgttcctgtctacact

SEQ ID NO: 54800 - DNA, 201 bp, Homo sapiens
ggcaaactcgtcgcctccagatatcccaggaaccatagcaatattcatggagccgtgttctataggcaacacccacactgtgatctagccaggagtgggcrcgcgttggcctgagagcctggtctgccccatcgtgttttggtaaatagacattttactggacacagccacacctatgtgggtacctgttacctggggctg

SEQ ID NO: 54801 - DNA, 201 bp, Homo sapiens
gcagtcaggagaggcttggggagctctgcattggtggtgtgggggggtggggggtcccggagggggaggcgtggaagtgggaggggcctgcaggggggcayccaacagcgaggctggcttggcaggacccgcgcatggaggggaaacctgagacggtggaggaggaagaaggaggcttagggcttcgctgggaccctggca

SEQ ID NO: 54802 - DNA, 201 bp, Homo sapiens
acaaaatgacatcccccatgtacaatccctgtaatattgtgactcgcacatcggttgaatgcttcaaagtgtaaagttaccacgtcgggtctgtctttccratgtgcttgcagctatgtaagttcagataacctcagagtgagctcgctggaggggcagttccgggaggagtttgtgtccatcgatcacctcttgccagat

SEQ ID NO: 54803 - DNA, 201 bp, Homo sapiens
atgcaggtgcccgctccgtcatcatgttggacggatggctggaagtgctaaaaacaataacgcctttgttttcatttatagagagacctaaaaacctgaaraggaaggggacaagtagccacctgagttcctgaggtgatgaagacagcccgatcctcccctggactcccgtgtaggaacctgcacacgagcagacaccct

SEQ ID NO: 54804 - DNA, 201 bp, Homo sapiens
ttcccctgttgtggtgaagctgtggtggaggagctcgtctgtgacgctggctccggcgatgcctggggcccctgctccctgcacaacgccttagtcatccrctgcctccaacccaccagtgcatgcgagagatgcgcagcctcagacacgccctttcccaagtccctcttcagacgtcctaggggagacccagaagagact

SEQ ID NO: 54805 - DNA, 201 bp, Homo sapiens
gaggcctgggactgagacctgggctagcttcacctccagcactgccgccctgcagccctgagcaccccctcggggcgtggtgagggctgtgctcgggctgsgtggaaagtgcttgctcctgctcaccttgctgggagaggcagcctggccccatactaggcactgagtggcctgctatgctcttcagtataaagctcagcc

SEQ ID NO: 54806 - DNA, 201 bp, Homo sapiens
ggtgtgccgcaagtcaagtactatgtagaatctgcagaatgaaatgaggtgtaggtattgcatcaggtattataactaacctagagatggttaaagtgtakgagaggatgcacgtggtttctgcgcactatgtcattttataccagggacttgagcatttgtggattttggcatccctgggtggggggtcctgaaaccagt

SEQ ID NO: 54807 - DNA, 201 bp, Homo sapiens
tgaggcctgggactgagacctgggctagcttcacctccagcactgccgccctgcagccctgagcaccccctcggggcgtggtgagggctgtgctcgggctsggtggaaagtgcttgctcctgctcaccttgctgggagaggcagcctggccccatactaggcactgagtggcctgctatgctcttcagtataaagctcagc

SEQ ID NO: 54808 - DNA, 201 bp, Homo sapiens
cccaggggccgacacttccacagtccccgggggaggccgtcccgggggatgctgccccaggcagcacctcatgatccacggaggctgcaaatcagcgctgytctcagaggaggaaggggtggagctttccagggcacagcaggcctgactgggtctcggtgctgtgcctgtcccatggcagagtcggatcagtgcgtcatg

SEQ ID NO: 54809 - DNA, 201 bp, Homo sapiens
tttgggggaggcccacaggatccagccctacacacaggcaaactcgtcgcctccagatatcccaggaaccatagcaatattcatggagccgtgttctatargcaacacccacactgtgatctagccaggagtgggcacgcgttggcctgagagcctggtctgccccatcgtgttttggtaaatagacattttactggacac

SEQ ID NO: 54810 - DNA, 201 bp, Homo sapiens
aggtcgttgccagcgtttccctgtgacaggacaaaaagtaaatttacagggcgtggagaagaaatttgctcaagatatcactccttttcctggctgccagscctgtgtttacccagtgatctggctctgcgtgggtgctgggtggtgggaggggactcatgctgctcccctccaattctgactttgtgggggaccacaggg

SEQ ID NO: 54811 - DNA, 201 bp, Homo sapiens
ggaggttgtcgtgagctgagattgtgccactgcactccagcctgggcaacaagagtgaaactccctctcaaaaaaaaaaaaaaaagaaaagaaaagaaaaraaaaaaaaaaaaagaaaagaaaagaaaagaaaagaaaagaaaaacttcagctgaattacatttaaagaagtttaattgagcaaagaactattcacgaatc

SEQ ID NO: 54812 - DNA, 201 bp, Homo sapiens
atttcattattaaaacaattccactgtaaaagaattagcttaggcctagacggaatgggcttcatgagctccttcccttccccctgcaaggtcacggtggycaccccgtgagccactgttgtcacggccaagcctttttccggccatctctcactatgaatcacttctgcagtgagtacagtatttaccctggcgggaggg

SEQ ID NO: 54813 - DNA, 201 bp, Homo sapiens
ggagggagccccatagacacaggggagtgaaccacgttcactttgtcagtttttgatggcagctcgtatatactatttttttctccctcctgcccccagcycctcccagaaggagacttaatctgtcgctcaggctggagtgcagtagggtgatctcgactcactgcaacctccgcctcccaggttcaagtgattctcctg

SEQ ID NO: 54814 - DNA, 201 bp, Homo sapiens
gggaggctgaggcgggtgcatcacctgaggtcaggagttcgagaccagcctggccaacatggtgaagccctgtctctactaaaaacacaaaaattagctgrgcgtggtggcacatgcctgtaatcccagctactcaggaggctgaggcaggagaatcacttaaacctgggaggtggaggttgcagtaagctgagatcatgc

SEQ ID NO: 54815 - DNA, 201 bp, Homo sapiens
gtggagcagaagctgggggttctcagagcccagctggtgtgtggcctgtccgttcttcccacagttctccagtgtcagaaaggtgggctttccacacaacrtctcgtagctgactgtttcctggctgtccaccatccgttctttcttacctaacttgcactctacgaaggaagggggagaaagaattcactttcccagccc

SEQ ID NO: 54816 - DNA, 201 bp, Homo sapiens
gctgtagaatcacttgaacctaggaggcggaggttgcagtgagccgagatcatgccactccactccagcttgggtgacagagcaaggctccatctcaaaamaaacaaacaaacaaacaaacaaacaaaaattagcctgacatggtggtcccagctactcaggaggctggggtgggattgcttgagcccaggaattctaagc

SEQ ID NO: 54817 - DNA, 201 bp, Homo sapiens
ttgcttgagcccaggaattctaagctgcagtgagccgtgatcatgccatcatactccatcctgggtgacagagtgagactttgcgtttaaaaaaacaaaayaaaacaaaaaaaaagtggagatttatttccacacgcagttgaggtgtctgtagggtggttttcctggaggctctgacccctttcctttgggttctggtgg

SEQ ID NO: 54818 - DNA, 201 bp, Homo sapiens
cccagagctgtgaaaatgctggcacagggtcccccactgatgatggactggcgcttgcctctgcattctctccctcgccacactggaattgtcttcaacargtttttatggataaggttatgtatggtgtggtcttgggttccgcccactctcacagggataaagctcttgtcccgagaaacggagagtcccgggggcagc

SEQ ID NO: 54819 - DNA, 201 bp, Homo sapiens
aaaggttatctctgcttgttggacaaacagaggggagattataaaacatacccggcagtggacaccatgcattctgcaagccaccctggggtgcagctgarctagacatgggacggcgagacgcccagctcctggcagcgctcctcgtcctggggctatgtgccctggcggggagtgagaaaccctgtaagtgaaggagag

SEQ ID NO: 54820 - DNA, 201 bp, Homo sapiens
cagcccgcccgcactgtagaaaggaccaggatggacaactgaatgggagacctcctcactgttcagggtgctgtgggagcctggggggcacagaagggtcrcgtgggcacagagggcaaagggcaggaaaggagaagccggtcctccacacgggtctgcagtacatggaggccttcacgggacacagatccccaggggctg

SEQ ID NO: 54821 - DNA, 201 bp, Homo sapiens
gtggttttcctggtgtcacgccctcccagtgtgcaaataagggctgctgtttcgacgacaccgttcgtggggtcccctggtgcttctatcctaataccatygacgtccctccagaaggtatggcctttttatacgatgggttctgaagatttagaattagttagaaaagtcatttaagactacagaggctctgatcagcat

SEQ ID NO: 54822 - DNA, 201 bp, Homo sapiens
aaataagggctgctgtttcgacgacaccgttcgtggggtcccctggtgcttctatcctaataccatcgacgtccctccagaaggtatggcctttttatacsatgggttctgaagatttagaattagttagaaaagtcatttaagactacagaggctctgatcagcatcaccagctatgcctttacacagagtcacggccgc

SEQ ID NO: 54823 - DNA, 201 bp, Homo sapiens
ggaggctgtgcaacagcttcatcctcccaggagattctccatcccgctgccgattttcttctcgctgtcaatctgctctgtccagtgcaaaaggtccgacragcccctgtcctgatgtagcttcagctccagcctgtcctggaatcttctcccataatgcattgagctgtttcgccacgttccgggcaggaagctgagtgt

SEQ ID NO: 54824 - DNA, 201 bp, Homo sapiens
ctgactcggggtcgcctttggagcagagaggaggcaatggccaccatggagaacaaggtgatctgcgccctggtcctggtgtccatgctggccctcggcaycctggccgaggcccagacaggtaaggcgtgcttcttcctgctctgtggggccacagccagctctggcagcctccgccaggagccactgttttacatacat

SEQ ID NO: 54825 - DNA, 201 bp, Homo sapiens
atctcaaaacaaacaaacaaacaaacaaacaaacaaaaattagcctgacatggtggtcccagctactcaggaggctggggtgggattgcttgagcccaggrattctaagctgcagtgagccgtgatcatgccatcatactccatcctgggtgacagagtgagactttgcgtttaaaaaaacaaaacaaaacaaaaaaaaag

SEQ ID NO: 54826 - DNA, 201 bp, Homo sapiens
ggcagccagagaccgcacagcccacgaagcctacaacattgactattcagccctttccacaaaaggtgtgctgaccctggtctaggttccctcacgctgcsacggtggagggctcttttacagttttaagtgctctgggtgtggtggatggggtaaggggctcctgctgtgagctgatcgttttcaagtaaccaagggctt

SEQ ID NO: 54827 - DNA, 201 bp, Homo sapiens
agcacccaccatcctcaggtctccccaagagcctgaccacctcccctgctgagctcccccttgcagcacttgtcttagagctgctgtgagctctgggagcrggggcagtgagggtggggagagaggagcaggtgcatggtggtgacaccatgtcccccaaagaagtctgcagggtggacccacaagcctttgttcccctcc

SEQ ID NO: 54828 - DNA, 201 bp, Homo sapiens
ctcctgacatcccagggtgttgtcatcactgggggaataggatggggagtggtgctgccaatgctgggcactgaccaagcagggcaggtgcttttcccacygcatcctccacagcacccaccatcctcaggtctccccaagagcctgaccacctcccctgctgagctcccccttgcagcacttgtcttagagctgctgtga

SEQ ID NO: 54829 - DNA, 201 bp, Homo sapiens
gggagtcaaagccacctctctcatgagtgcgtggctggcaacccatattccctggtgttgtcaagtggatcggttgccctgggtccttctagggagtggasgaggaggccattcttgcttccttgggaagtgtttgcatctcaactcctttacctgcagaatggatcaacggtctgccctagggctgtcaggaaatgctgt

SEQ ID NO: 54830 - DNA, 201 bp, Homo sapiens
gaacaagcctggggtgtacacccgtgtcacctccttcctggactggatccacgagcagatggaggtgggtgcggcgccctccccagctcacgttgtccctsgcttttgaccctaaggtcccttaaatgcaaccctggtcttgctataaaaaccagggcgtgacccagtggttgtcaattcagcagcagtgacttggtggct

SEQ ID NO: 54831 - DNA, 201 bp, Homo sapiens
agaacttggtgtccctgcttgggtgccccccgacaatactgcacctagttttgtgctcacctcccctctggacttgcttcaggccaagcaaaaggcatttyactggaatgcgcaaagagtgactcaaccaaggacataggagatggtcactcactgtgtggctgcagcccagggtgggtggacggggctgtcaggtacagg

SEQ ID NO: 54832 - DNA, 201 bp, Homo sapiens
gaggcccacaggatccagccctacacacaggcaaactcgtcgcctccagatatcccaggaaccatagcaatattcatggagccgtgttctataggcaacayccacactgtgatctagccaggagtgggcacgcgttggcctgagagcctggtctgccccatcgtgttttggtaaatagacattttactggacacagccaca

SEQ ID NO: 54833 - DNA, 201 bp, Homo sapiens
atcttccatcttgtgactctccaaacatgtgattcttctttaaaaagttgcatcactttcaccactgttctccagaagacctgtgtcctggcactgtaaamatgagctgggctctggtgttcgtggaatcgctttcttgtttgtgttcatctctttccagtggggctctgcgctggtcctgggcaggtgagggatgtctct

SEQ ID NO: 54834 - DNA, 201 bp, Homo sapiens
tccggctcctccaaagacccctgtgacttcgtcaggtccaccctcttacttgggatcatctccccactcaaggcctgtccctcaatgcacctgcaatgtcycatttgccctgtaaggtgacacagtcacaggttctggggattggggtgagaatgtctttggggtcatttttctgctgaccatcccagagttcacaaagac

SEQ ID NO: 54835 - DNA, 201 bp, Homo sapiens
aagcctactgtactgtgttttgttcatttcacaagggaaggagaacatggctgtttattcaccatcttccatcttgtgactctccaaacatgtgattcttytttaaaaagttgcatcactttcaccactgttctccagaagacctgtgtcctggcactgtaaaaatgagctgggctctggtgttcgtggaatcgctttctt

SEQ ID NO: 54836 - DNA, 201 bp, Homo sapiens
agcatagcgcctcagccactctccctggaggagcctggcctcacactccaatcattcccctctccttctgggttaatttgaggaatgtggtcccgctccaygctgtgggtctgtgcctcaagttccctggccaggaaagtacctgcctcctccaatacctgaggaccccaaccccagggcctcagctgggtgtccttgtaa

SEQ ID NO: 54837 - DNA, 201 bp, Homo sapiens
atctaacgctctttaagcaaacagagcctgccctataaaatccggggctcgggcggcctctcatccctgactcggggtcgcctttggagcagagaggaggyaatggccaccatggagaacaaggtgatctgcgccctggtcctggtgtccatgctggccctcggcaccctggccgaggcccagacaggtaaggcgtgcttc

SEQ ID NO: 54838 - DNA, 201 bp, Homo sapiens
aaggcacaggtcaggggcagcgggcaggtggggagcgtcaggaggagactgactccccaactgcgcgtcccccttgtggggaatctgggcggctgcggggmcccccactgaaaatgaggggctctcgccagaccgcagggaggtcggctgggcgcaggaaacaagcaatgcctgcacagccacagacgcccccacggccat

SEQ ID NO: 54839 - DNA, 201 bp, Homo sapiens
gggaagatggtgtgtggagaggacgcccacctgggctgtggctgagagggggacgtggcctgtcccaggtgatcccaggagggatcctggaggagagcccyggatccacttcctcccaaactcctccctccctccagggccacctacagaaccccctcctgccaaggcacaggtcaggggcagcgggcaggtggggagcgt

SEQ ID NO: 54840 - DNA, 201 bp, Homo sapiens
ggaagctcctgtgctggaggaaacccacaaaaatgaaaggacctagaccttcccatagctaattccagtggaccatgttatggcagagacagggtgagacrgtggtgcgggaggctagagggaatatgttgggggccaggtactgggtctcttcttaaaatctcaggagtttagagtgcaagaaaactacagaaaagactt

SEQ ID NO: 54841 - DNA, 201 bp, Homo sapiens
ctgcagtcactgcacgttttcatctctagggaccagaaccaaacccaccctttctacttccaagacttattttcacatgtggggaggttaatctaggaatkactcgtttaaggcctattttcatgatttctttgtagcatttggtgcttgacgtattattgtcctttgattccaaataatatgtttccttccctcattgtc

SEQ ID NO: 54842 - DNA, 201 bp, Homo sapiens
ggtaaaaatgagctaactttatttagtccaattcctcttaaaattcagtttgtcataataatttgcacagcttctgtcagtcacagtctttgggaacgcaytgctcagtctcttacctcgctctactccgtcttgccctctctacccctgggtggggtgaaggagcccctggggtctgcccatgccctttggattcctgct

SEQ ID NO: 54843 - DNA, 201 bp, Homo sapiens
ttcccacagttctccagtgtcagaaaggtgggctttccacacaacatctcgtagctgactgtttcctggctgtccaccatccgttctttcttacctaactygcactctacgaaggaagggggagaaagaattcactttcccagcccctcttttagccagaagtggccgtgcaattctatgtggcccatgagacataggggg

SEQ ID NO: 54844 - DNA, 201 bp, Homo sapiens
ctgataggaaacatcagctcataagaaagagacacacacctggcaaatcccagtccttgtaacttaccagaaggaagggatggccattaggaagaaggggytccctgacttaaaggtccaagtagacagaagacaccagttggtaacacaagaataaatagtattatttttaaaggatttctgacttgttcttttcagctc

SEQ ID NO: 54845 - DNA, 201 bp, Homo sapiens
atcgagtcacctgctggatttgtgatgctatgcacaactccacaaggacttaagaggcatgcatgtgttatctcagatggaaggtgggagttggccacctygatgagactggtggatgcgccaggctgggggtgtgagaacctgagggagtatggcccaataaagaaagggaaggaaatagagtagaagggtaacaatgct

SEQ ID NO: 54846 - DNA, 201 bp, Homo sapiens
cctcactaaagcatctctttctccctccccctcacccctgtagaggagtgtgaattttagacacttctgcagggatctgcctgcatcctgacgcggtgccrtccccagcacggtgattagtcccagagctcggctgccacctccaccggacacctcagacacgcttctgcagctgtgcctcggctcacaacacagattgac

SEQ ID NO: 54847 - DNA, 201 bp, Homo sapiens
tgtgggctggcagaaaactgaaatctgctactcacggataagcaagcacagtgcctgaccccttgatagggagggttgtttggctaggggaccttatccaygagtagagatgggaggggaacttttggtgaggctgcttgaggccctctctgtttcaccagatgtcaaggcagtacttaatattgtgccttaagtttaggt

SEQ ID NO: 54848 - DNA, 201 bp, Homo sapiens
ccagatgtcaaggcagtacttaatattgtgccttaagtttaggtcttatgccataaggatagttagtttcttattcacaggatgtgcagaaatgtgagaamtttatggagaactgtctcccaacaaccagtatactaaatatcttaatttcaggacaagattatagagggaggaaaaaggattaaggctcacaaggctcat

SEQ ID NO: 54849 - DNA, 201 bp, Homo sapiens
cactgggcgagtgtgtggttgtggctgtcattgttaccattttgagacttggacagttcatggggctccagttgcagcactggggtccccttgcctggcasaagccccgccacctgcactggggccaagccatcccagcaaccatcggctctttcatgccagtgccagcggaatccgtgcattgagcaatccctggaaggg

SEQ ID NO: 54850 - DNA, 201 bp, Homo sapiens
tgaggaccccaaccccagggcctcagctgggtgtccttgtaaagggtccctggggtggcagttgcttttttgaccagaggcctggcaggaaacgggcttcrccacagcggatctgggcaatgcgaggagagtgaagactgtaaaagtctccttgcggctggtaaaccccccaggctggggcaggggggtgaggggtctgct

SEQ ID NO: 54851 - DNA, 201 bp, Homo sapiens
tctgtgtgtccaaatgtcctcttctcataaggacaccagtcaggtcggattagggcccaccctaacaaccccattttaacttgataaaagaaaaacttggscagacgtggtggctcatgcctgtaatcccagcactttgggaggctgaggcgggcagatcacctgaggtcaggagttcgagacctgcctgaccaacatgga

SEQ ID NO: 54852 - DNA, 201 bp, Homo sapiens
ctgcacccagcctggatttttttaaacggctagatagtaaatattgtaggttttggaggccttacagtctttgtcacaatgaatcaactctgcaattgttyctgaaagcatattttcagagtatagaacttttccctagcacttacacatgttatcccattgtcttctggtttgcattatcagataaaaagaaatacttga

SEQ ID NO: 54853 - DNA, 201 bp, Homo sapiens
gattataggtatgagccaccatgcctggcttttttttttttttccttttaaactaatataacaatttcagcaaagccctatcggcttctcaggaggaaacygcattgcttaaatatgggcaagataagactttgtgtttctctatgtggcaacaagacagtagaggcatcccctagaacctctgagagaaggagcagtgtg

SEQ ID NO: 54854 - DNA, 201 bp, Homo sapiens
ttattactcatgctacagcaagcagcatgaagaaaggttacttgtgttggttctctttgcctccaagacccccaagggactgggaccgggaatgggctcasatgggtgcctgcacacacagtgggttgccttataggagagaagccctggacttagggatccaagtgttttataagggacagtgagcttgcctgctctttg

SEQ ID NO: 54855 - DNA, 201 bp, Homo sapiens
ccttatttccctcagattttcttcaacaaaagaaaacattacggagacatcgaaggcccctttgcgccctaccccgccgccttttcctgcttcctccttcytagacagacccatcatgctgaagtcagtgtctcgttcctgtctacactgtcatcattttgttcatctggatgcagttccaacagtatatcacattgtttc

SEQ ID NO: 54856 - DNA, 201 bp, Homo sapiens
agtggaccatgttatggcagagacagggtgagacggtggtgcgggaggctagagggaatatgttgggggccaggtactgggtctcttcttaaaatctcagragtttagagtgcaagaaaactacagaaaagacttccaaacacaatggttctccctgatatttttaccccctattttgttgctgtttgatgaacagtagtg

SEQ ID NO: 54857 - DNA, 201 bp, Homo sapiens
aacccacaaaaatgaaaggacctagaccttcccatagctaattccagtggaccatgttatggcagagacagggtgagacggtggtgcgggaggctagaggkaatatgttgggggccaggtactgggtctcttcttaaaatctcaggagtttagagtgcaagaaaactacagaaaagacttccaaacacaatggttctccct

SEQ ID NO: 54858 - DNA, 201 bp, Homo sapiens
tgggctggtgccctggggaggtgtcttggccactgttgcccctactcctcctcctctttggacaccttaggggagtcggtggccctgccttgaagcagacyggccccttgcggccactcgtaggagggcaagctcgggcttgaggtgcttcgagacagtgggagtctgctcgtcccacccgcagggccctgtccttttccg

SEQ ID NO: 54859 - DNA, 201 bp, Homo sapiens
acgcctagcctcacgctcctttctgatcttcactaagaacaaaagaagcagcaacttgcaagggcggcctttcccactggtccatctggttttctctccaggggtcttgcaaaattcctgacgagataagcagttatgtgacctcacgtgcaaagccaccaacagccactcagaaaagacgcaccagcccagaagtgcaga

SEQ ID NO: 54860 - DNA, 201 bp, Homo sapiens
ttgggctggtgccctggggaggtgtcttggccactgttgcccctactcctcctcctctttggacaccttaggggagtcggtggccctgccttgaagcagastggccccttgcggccactcgtaggagggcaagctcgggcttgaggtgcttcgagacagtgggagtctgctcgtcccacccgcagggccctgtccttttcc

SEQ ID NO: 54861 - DNA, 201 bp, Homo sapiens
ttgtttcacatagtttggaaatctacattataaatgatatcctactttacaaaccattttaacggattttttcacttcgctttgttttcaatatttctcattatttattcattttcatcttctgaaagatactcacatacatacatatataatatatgtaaagtataatacatgtatgcaattagttctctatattcatgg

SEQ ID NO: 54862 - DNA, 201 bp, Homo sapiens
tgtttcacatagtttggaaatctacattataaatgatatcctactttacaaaccattttaacggattttttcacttcgctttgttttcaatatttctcattatttattcattttcatcttctgaaagatactcacatacatacatatataatatatgtaaagtataatacatgtatgcaattagttctctatattcatggg

SEQ ID NO: 54863 - DNA, 201 bp, Homo sapiens
tggaaggtaacgtcgctgtgggactctctgtctggttcccggacaccatgattcctcctccgtccgtagaggtggggtgcagggaggggagctgcctcgcwgcctcagtgccatcgaggccagggcccctgcctcctatgggattctgaaggcaattccagaatgttcttggcaaagacagcgtcttttcaataagtttat

SEQ ID NO: 54864 - DNA, 201 bp, Homo sapiens
gtttcacatagtttggaaatctacattataaatgatatcctactttacaaaccattttaacggattttttcacttcgctttgttttcaatatttctcattatttattcattttcatcttctgaaagatactcacatacatacatatataatatatgtaaagtataatacatgtatgcaattagttctctatattcatgggt

SEQ ID NO: 54865 - DNA, 201 bp, Homo sapiens
gaggacaggccagccaagcgtcgctggggccgacacttccacagtccccgggggaggcggtcccaggggccgacacttccacagtccccgggggaggccgycccgggggatgctgccccaggcagcacctcatgatccacggaggctgcaaatcagcgctgctctcagaggaggaaggggtggagctttccagggcacagc

SEQ ID NO: 54866 - DNA, 201 bp, Homo sapiens
tttcacatagtttggaaatctacattataaatgatatcctactttacaaaccattttaacggattttttcacttcgctttgttttcaatatttctcattatttattcattttcatcttctgaaagatactcacatacatacatatataatatatgtaaagtataatacatgtatgcaattagttctctatattcatgggtt

SEQ ID NO: 54867 - DNA, 201 bp, Homo sapiens
ccaggcacgtcctctggagaaggaggattcatccccaagattgttgctgggaggcttgctgggccccgcagggaaaccaggcagatggtggattgttcacsagcgcccactgaatggcagtgtctttgggaatcaataccatgtccaaacgctttccatcttaccaaggtgcccacaaaccttttctcatcttggcccggg

SEQ ID NO: 54868 - DNA, 201 bp, Homo sapiens
gtgttgttcacatgggatttgccactgctcaggagggtggctccaagaagggcctccctcctagggaaaggctgagtgacggcaggtgtcagcgggccccrtgtcgggccaggagggcattcccaccaagggtccttggagtcccagagcactcacctctcgcctggatcttggccttgggtccatctgttcaccctcctc

SEQ ID NO: 54869 - DNA, 201 bp, Homo sapiens
ccagaggagccctggaggatggagcctggaggacgggggcctggagaatgagggtctggaggacgagggtctggaggaacaggggcctggaggatgagggyctggaggaagagggcctggaggacaggggcctgaaagatgggggcctggaggatgagggtctggaggatgagggtctggaggagcaggggcctggaggat

SEQ ID NO: 54870 - DNA, 201 bp, Homo sapiens
ggatgtttgttaaatgtgaagattgcagggcgtttatctggagtctgattgggaggtctggggtgaagaccctggtgaatgtgttgcatgggggcttcagrgcacactgagaaaccctgggagggtcttggaggcagtttcccctgttgtggtgaagctgtggtggaggagctcgtctgtgacgctggctccggcgatgcc

SEQ ID NO: 54871 - DNA, 201 bp, Homo sapiens
ccggacccagaggagccctggaggatggagcctggaggacgggggcctggagaatgagggtctggaggacgagggtctggaggaacaggggcctggaggaygagggcctggaggaagagggcctggaggacaggggcctgaaagatgggggcctggaggatgagggtctggaggatgagggtctggaggagcaggggcctg

SEQ ID NO: 54872 - DNA, 201 bp, Homo sapiens
acaggatctggctttgccgcccaggcaggagtgcagtggtgtgatcttggctcactgcaacctctgcctcccaggctcaagtgatcctcccacctcagcckcctgagtagctgaaaccacagttgtggaccatcatgcccggccaatttttttttttgtattgtttgtagagatggggtttcgacatgttgcccaggatgg

SEQ ID NO: 54873 - DNA, 201 bp, Homo sapiens
ggcagaagtggagtggagatggaagttcctagagatgaggaaaaataaaatctgagcgactgtgaattttgatgaaacatcgaccgccatgttgaagatgsctgggatgtggccaagtcttagcatgacaaggaacacagtgaactcagtgctgaaattcttaacgaaagggacaggctgcacaaaggtcggcagatgaca

SEQ ID NO: 54874 - DNA, 201 bp, Homo sapiens
agctgaggtggttcccatttgttgactttctatgtgaactgatggaaagtatcatccccaaagtgtgcaaaatggaagtgagcaggggtggagaaggataracagaaagaggagggcgccagccctgagtgcctggatggcgctgagatcatgcgttgagagtggcaacaattcaaggtaggtgtcggccatgctaggcag

SEQ ID NO: 54875 - DNA, 201 bp, Homo sapiens
agatgggacaaagggcatcgtgctgcggttggggaggctctaaccacagccctgggagcagtctcttacctcctctgagatgcttcccttcctcagggagkggacttttccatgctatctgctggcctgtacattttccccagtaaacttggccctaatattttctaaattcctgtggtccctgcccactctatcaataga

SEQ ID NO: 54876 - DNA, 201 bp, Homo sapiens
ttcttgctggtggggactctcagatgtgtcccaaggcagcccagggtattccatggtgagggcgctgagtgtgttcatgtcctagcacaggtctctcttcktataaagccaccaggtccccttccacaataacccatgaatccatcatcccatgaatccattaattcatgagtggattaattcattcatgagagcggagct

SEQ ID NO: 54877 - DNA, 201 bp, Homo sapiens
agcacatcctaccccaggaaggccatgggctgggtcccaggtgccatctttcagaagatgtagagcattcccatggaacaaaaataacccatttcaggggytggctgaaaatgaacttattaaaacctgcctgtcacaggctactccgctgaccctgtcagcctcatctccatggagagcagcccctcctgctgaagatgg

SEQ ID NO: 54878 - DNA, 201 bp, Homo sapiens
gttgtccctggcttttgaccctaaggtcccttaaatgcaaccctggtcttgctataaaaaccagggcgtgacccagtggttgtcaattcagcagcagtgayttggtggctccagggtgtcagacgcttgtgctgaaaacagagatcacagctagtcctgggcagctctgggtgggtgcagcctggcaggcagaggagctgg

SEQ ID NO: 54879 - DNA, 201 bp, Homo sapiens
aagataaatgactttattactcatgctacagcaagcagcatgaagaaaggttacttgtgttggttctctttgcctccaagacccccaagggactgggaccrggaatgggctcagatgggtgcctgcacacacagtgggttgccttataggagagaagccctggacttagggatccaagtgttttataagggacagtgagct

SEQ ID NO: 54880 - DNA, 201 bp, Homo sapiens
tgcacccagcctggatttttttaaacggctagatagtaaatattgtaggttttggaggccttacagtctttgtcacaatgaatcaactctgcaattgtttytgaaagcatattttcagagtatagaacttttccctagcacttacacatgttatcccattgtcttctggtttgcattatcagataaaaagaaatacttgat

SEQ ID NO: 54881 - DNA, 201 bp, Homo sapiens
tgactcagtcacttatatcatgatggtgactaaagtgacagggatgtagaacaaggaaactgaccttgccagagttttcatggatcgagtccctgtggttrcccagtggtgaacagtcagcagagagcctggaggtacttgacccggacccagaggagccctggaggatggagcctggaggacgggggcctggagaatgag

SEQ ID NO: 54882 - DNA, 201 bp, Homo sapiens
tctacctggcagagtcattactgcatccatcacatggacacgtaatgcccagaaacaaatatttccagagaagcaggaaaatgattatggtggtgccagtytgccaactattattaatgatattggttataggaaatgaggtgccagcacttgtactttgccaaagtttcaagtgagttcttttattccttctctacctct

SEQ ID NO: 54883 - DNA, 201 bp, Homo sapiens
cccagtctgagcccatgtgatggggacgtggccaccaagtacagttgtggaggttgtgaacagctccactttcaactagcgatgccactctattgcagacrtcccatctcgtgtaatggtttcccaactctgtgggcactcagtgtccctgcgtgggggcctgagcaggattccagggaagcatgcctatgacaacacagg

SEQ ID NO: 54884 - DNA, 201 bp, Homo sapiens
tttcatttcagatgttgtattttttatttctaaaatttgtacctggttaatttttagtttccatttatctactgagattcctttttgttcctttattataytatgtttttctttcaatctttgaacattttatgccatgtctaagtctgtttttgttcactgatttttctaatgattatgggccatatttcctagttctct

SEQ ID NO: 54885 - DNA, 201 bp, Homo sapiens
ctgttgctaagttgaaactggtcatttataagaaatgaacttcatctcttacagttctggagactgggatgtccaaggttgaggggttgtatctcttgagygccttcttgctggtggggactctcagatgtgtcccaaggcagcccagggtattccatggtgagggcgctgagtgtgttcatgtcctagcacaggtctctc

SEQ ID NO: 54886 - DNA, 201 bp, Homo sapiens
gcacccagcctggatttttttaaacggctagatagtaaatattgtaggttttggaggccttacagtctttgtcacaatgaatcaactctgcaattgtttcygaaagcatattttcagagtatagaacttttccctagcacttacacatgttatcccattgtcttctggtttgcattatcagataaaaagaaatacttgatc

SEQ ID NO: 54887 - DNA, 201 bp, Homo sapiens
tgacctcaggtgatctgcccacctaggcctccctaagtgctgggattgtggcgtgagccactgcacccagcctggatttttttaaacggctagatagtaartattgtaggttttggaggccttacagtctttgtcacaatgaatcaactctgcaattgtttctgaaagcatattttcagagtatagaacttttccctagca

SEQ ID NO: 54888 - DNA, 201 bp, Homo sapiens
tttaggattcagacaaagggagaatgttaggagcttaggacatcctgggcagaaaggacatttgcataccctctttcagaggtggagctcaagttctgagygtggtcatgggagggtggcagaagtggcagaagtggagtggagatggaagttcctagagatgaggaaaaataaaatctgagcgactgtgaattttgatga

SEQ ID NO: 54889 - DNA, 201 bp, Homo sapiens
ttcatcctacaaagagcaagtggaagcagcagcagatgagatcgctgtaataataagggaagtaggagtggcagtaaccatagtccatgcaaatgaagccygggccaccctttccttagtgtgggtacagagctggtcatgagtcttaggtttttccatcaatcactttctttgttagtaggaagaggattcattttccgt

SEQ ID NO: 54890 - DNA, 201 bp, Homo sapiens
ctagacggaatgggcttcatgagctccttcccttccccctgcaaggtcacggtggccaccccgtgagccactgttgtcacggccaagcctttttccggccmtctctcactatgaatcacttctgcagtgagtacagtatttaccctggcgggagggcctctcagatatgagtaggacctggattaaggtcaggttggagga

SEQ ID NO: 54891 - DNA, 201 bp, Homo sapiens
acctagagatggttaaagtgtaggagaggatgcacgtggtttctgcgcactatgtcattttataccagggacttgagcatttgtggattttggcatccctgggtggggggtcctgaaaccagtcccccaggggtactaagggacgactgcattgtattttaagttcattttccctttccctggttaatgaatatttatttt

SEQ ID NO: 54892 - DNA, 201 bp, Homo sapiens
ccctgggacgatggccttgcgttgtctcgcacatgttcttgcctttctcctccatcagatccttagactcttttttttttttttttgagatggagtcttgytctgtcactcaggctggagtgcaatggtgcgatcttggctcactacaacctctgcctcctgggttcaagtgattctcctgcctcagcctcccaagtagct

SEQ ID NO: 54893 - DNA, 201 bp, Homo sapiens
taaccaaaagcctgggaagagccactgttggtaacgctttctagcttgcctaggatagagggggaaggcatgacgaaatctgaagacatttcatgtattcttttttttttttttttttgaaatggagtctcgctccgttgcccctgagctggagtgcaatggtgcgatcttggctcactgcaatctctgcctcctgagttc

SEQ ID NO: 54894 - DNA, 201 bp, Homo sapiens
ctggaattgtcttcaacaagtttttatggataaggttatgtatggtgtggtcttgggttccgcccactctcacagggataaagctcttgtcccgagaaacrgagagtcccgggggcagctccagccgctccaaccctaatgtgggaggccaaactccggcacttggtagttatctcacagctctcccaaggagataggagc

SEQ ID NO: 54895 - DNA, 201 bp, Homo sapiens
tacaggtaaaaatgagctaactttatttagtccaattcctcttaaaattcagtttgtcataataatttgcacagcttctgtcagtcacagtctttgggaaygcattgctcagtctcttacctcgctctactccgtcttgccctctctacccctgggtggggtgaaggagcccctggggtctgcccatgccctttggattcc

SEQ ID NO: 54896 - DNA, 201 bp, Homo sapiens
aggcgatgctgttgtctgcacaggtatcgagtcacctgctggatttgtgatgctatgcacaactccacaaggacttaagaggcatgcatgtgttatctcakatggaaggtgggagttggccaccttgatgagactggtggatgcgccaggctgggggtgtgagaacctgagggagtatggcccaataaagaaagggaagga

SEQ ID NO: 54897 - DNA, 201 bp, Homo sapiens
aacaatgctgtgagtgtgaccaatgtactgtcatgtgacaggcactctgggtgtgtctggggaatgaaagcaggcaagcaagaaggggggtggggaggaaragaggaagggagggagggagggaggaaggaagggagggagggaggaagagagggagggtaaaaggaagaaaaacagaaattaagatagaaatttatcctt

SEQ ID NO: 54898 - DNA, 201 bp, Homo sapiens
gaggttgtcgtgagctgagattgtgccactgcactccagcctgggcaacaagagtgaaactccctctcaaaaaaaaaaaaaaaagaaaagaaaagaaaagaaaaaaaaaaaaagaaaagaaaagaaaagaaaagaaaagaaaaacttcagctgaattacatttaaagaagtttaattgagcaaagaactattcacgaatcg

SEQ ID NO: 54899 - DNA, 201 bp, Homo sapiens
tttcaatgttaccctgtttaaatgtagtttgtagatcctggcctacagaatgaatgcactgatgactctgccaggtagattggtgggctgtagttccaacrataattttagagccttcgtgggctgtgtgctttgtctggtgccaccttctccctgttggtgccaccttctccctgttggtgccacctggaggcagaaaga

SEQ ID NO: 54900 - DNA, 201 bp, Homo sapiens
tagaatacaaatatttccctccattgttatttttaaactttatttttagacagcttaaggctacaatataggggtatgtgcaacctctcctgagttcaagygattcttctgcttcagcctcctaagtagctgggattgcaagcatgagctaccatgcctgactaattattgtatttttagtagagatggaatttcaccatg

SEQ ID NO: 54901 - DNA, 201 bp, Homo sapiens
gtcggggatgaataagcaccccgggacccacctgcagtctggagggacagctcatgtgttgggtgctaaatccacagtctggtgacactagctttctcttrcatgatgagctggggctcaaaaggcagaaaacattacaaagattttgggatccctttcccttcactatgagaaaagcacacaccctggtctccacctgtg

SEQ ID NO: 54902 - DNA, 201 bp, Homo sapiens
gagatggaatttcaccatgttggccaggctgttcctgacctcaggtgatctgcccacctaggcctccctaagtgctgggattgtggcgtgagccactgcamccagcctggatttttttaaacggctagatagtaaatattgtaggttttggaggccttacagtctttgtcacaatgaatcaactctgcaattgtttctgaa

SEQ ID NO: 54903 - DNA, 201 bp, Homo sapiens
tagagggaggaaaaaggattaaggctcacaaggctcatttctgtaacattttcttaagaaaaatagaatacaaatatttccctccattgttatttttaaaytttatttttagacagcttaaggctacaatataggggtatgtgcaacctctcctgagttcaagcgattcttctgcttcagcctcctaagtagctgggattg

SEQ ID NO: 54904 - DNA, 201 bp, Homo sapiens
tcttcgtataaagccaccaggtccccttccacaataacccatgaatccatcatcccatgaatccattaattcatgagtggattaattcattcatgagagcrgagctctcacgatccaatcacctgttaaaggccccacctctcaatacggccacattggggattaagtttcgacatgagtttggagggacattcaaattat

SEQ ID NO: 54905 - DNA, 201 bp, Homo sapiens
ccaggaggatgcaattggcttgtttaaataattctgtgggctggcagaaaactgaaatctgctactcacggataagcaagcacagtgcctgaccccttgayagggagggttgtttggctaggggaccttatccacgagtagagatgggaggggaacttttggtgaggctgcttgaggccctctctgtttcaccagatgtca

SEQ ID NO: 54906 - DNA, 201 bp, Homo sapiens
aagaggaggctgtgcaacagcttcatcctcccaggagattctccatcccgctgccgattttcttctcgctgtcaatctgctctgtccagtgcaaaaggtcygacgagcccctgtcctgatgtagcttcagctccagcctgtcctggaatcttctcccataatgcattgagctgtttcgccacgttccgggcaggaagctga

SEQ ID NO: 54907 - DNA, 201 bp, Homo sapiens
aagtgcttgctcctgctcaccttgctgggagaggcagcctggccccatactaggcactgagtggcctgctatgctcttcagtataaagctcagcccagccmgcccgcactgtagaaaggaccaggatggacaactgaatgggagacctcctcactgttcagggtgctgtgggagcctggggggcacagaagggtcgcgtgg

SEQ ID NO: 54908 - DNA, 201 bp, Homo sapiens
caggagtttagagtgcaagaaaactacagaaaagacttccaaacacaatggttctccctgatatttttaccccctattttgttgctgtttgatgaacagtrgtgcctgatagactccttgcagtgaccaatgttgagttcagccctcaaatgccaagacgacctcagaggtgctgagagtgaggtctgggaaacacatggg

SEQ ID NO: 54909 - DNA, 201 bp, Homo sapiens
ttttgaggtagcaaacagactaaattagaccaaaccatacatgcccacacatgcacgtgctacaaggggactcagtgaagctaaaggcaagtattggaagrattttctacatttcatctgatctagtctatcagtgtcgagaagtgggaagggctgagcttattatatcctacgtgcaagccagcaggtgagtctgccagt

SEQ ID NO: 54910 - DNA, 201 bp, Homo sapiens
aggcagagaagcccaccgccgtgtcttccagctgtcgtgggtgagctggagacaaacgttcaaaatcagtctggggagcccgctcacaacggttccatgayggggccacctcagcccctcccatgtcagcaccgtcctgggccacagagcctgtgaccctccctgtactacagcggagacgacctgcatgaggccccccca

SEQ ID NO: 54911 - DNA, 201 bp, Homo sapiens
tggaaacatgtccttgctctcgcagtggccctggcaggccagccttcagttccagggctaccacctgtgcgggggctctgtcatcacgcccctgtggatcrtcactgctgcacactgtgtttatgagtgagtgctgctgaccatcttcccagacccctgttcactcctgggtcatgtcagggtggggctgctttgggtggt

SEQ ID NO: 54912 - DNA, 201 bp, Homo sapiens
gtacaatccctgtaatattgtgactcgcacatcggttgaatgcttcaaagtgtaaagttaccacgtcgggtctgtctttccgatgtgcttgcagctatgtragttcagataacctcagagtgagctcgctggaggggcagttccgggaggagtttgtgtccatcgatcacctcttgccagatgacaaggtgactgcattac

SEQ ID NO: 54913 - DNA, 201 bp, Homo sapiens
tgctactcacggataagcaagcacagtgcctgaccccttgatagggagggttgtttggctaggggaccttatccacgagtagagatgggaggggaactttyggtgaggctgcttgaggccctctctgtttcaccagatgtcaaggcagtacttaatattgtgccttaagtttaggtcttatgccataaggatagttagttt

SEQ ID NO: 54914 - DNA, 201 bp, Homo sapiens
cccccaggggcagaccctcccaaggcccatccagataggcccaaatgccggtcccagtgatggccacctgggagaccctctcccacaggcccgaatgcccrtcccagtggtggccaactgggagaccctctcctacaggttcctgggctcccctgggatccatgctctgggagtcaaagccacctctctcatgagtgcgtg

SEQ ID NO: 54915 - DNA, 201 bp, Homo sapiens
tggttctcccaggaggatgcaattggcttgtttaaataattctgtgggctggcagaaaactgaaatctgctactcacggataagcaagcacagtgcctgaycccttgatagggagggttgtttggctaggggaccttatccacgagtagagatgggaggggaacttttggtgaggctgcttgaggccctctctgtttcacc

SEQ ID NO: 54916 - DNA, 201 bp, Homo sapiens
agtggctagtggttctcccaggaggatgcaattggcttgtttaaataattctgtgggctggcagaaaactgaaatctgctactcacggataagcaagcacrgtgcctgaccccttgatagggagggttgtttggctaggggaccttatccacgagtagagatgggaggggaacttttggtgaggctgcttgaggccctctc

SEQ ID NO: 54917 - DNA, 201 bp, Homo sapiens
gtcctgtggcccagccactgcgtctttcagataagaaaactaagacccagagctgtgaaaatgctggcacagggtcccccactgatgatggactggcgctygcctctgcattctctccctcgccacactggaattgtcttcaacaagtttttatggataaggttatgtatggtgtggtcttgggttccgcccactctcaca

SEQ ID NO: 54918 - DNA, 201 bp, Homo sapiens
attgattcttcctacccatgagcatggaatgttcttccatttgtttgtatcctcttttatttcattgagcagtggtctgtagttctccttgaagaggtccktcacgtcccttgtaagttggattcctaggtattttattctctttgaagcaattgtgaatgggagttcagtcatgatttggctctctgtttgtctgctatt

SEQ ID NO: 54919 - DNA, 201 bp, Homo sapiens
gtttatgcagccaaaagacacatgaaaaaatgtttatcatcactggccatcagagaaatgcaaatcaaaaccacaatgagataccatctcacaccagttasaatggcgatcattaaaaagtcaggaaacaacaggtgctggagaggatgtggagaaataggaacacttctacactgttggtgggactgtaaactagttcaa

SEQ ID NO: 54920 - DNA, 201 bp, Homo sapiens
ctttacttattataatcaaagttcaatttttgcacttataccctggggccagtttgcagaggcacaatttataaatggatgaaaaacaattaataacaacragaaaaaccattaatgatcctatcaacaaagtgctacgtaatctccaattgcaaaatcttgcacaacatataaaatagaacacacaacctcagctagtgc

SEQ ID NO: 54921 - DNA, 201 bp, Homo sapiens
agtcttactctgtcaccaggatggaatgcagtggtgcgttctcggcttactgcaatctccacctcctgggttcaagcaattgcctgccacagcctcctgartagctgggattacgggtgcgcaccaccacatccagctaatttttttgtattttagtagagatggggtttcaccatgttggccaggatggtcttgatcttc

SEQ ID NO: 54922 - DNA, 201 bp, Homo sapiens
gaattgaatagccaggttgccaatctataatggggtacaaaaaatgtctgaaaatgtaacttgatagagaaaatctccaattcattttcatttgtatggtraggcagatgaattttataagctgtaaagaggtgagggttatatcctcaacggtcatacttcctaatgcttgatcatcatcataccacgtattagtccatt

SEQ ID NO: 54923 - DNA, 201 bp, Homo sapiens
catttccttctatacctattttgttgtgagtttttatcattaaaacatgttgaattttatcaaatgcgtttttttttccatctatacaaatgaatacatgttttttttttccttcgttctgtcgatgtgatttatcactttcattgatttaggtatgttgaaccatccttatatctatggaatgaatctcacttgataatg

SEQ ID NO: 54924 - DNA, 201 bp, Homo sapiens
cgccactttgtgcaaggtaaagagggcttacacacactcagttttccacagagttctagtaactttcaatagtacaaatcctggatccgatgttagtcgartaataattccaatggaggaaaaaatacttttcatctgtgagtcgcttttcagaagggataatgtctaaaccttgttagcctcttcctggttaccctgagg

SEQ ID NO: 54925 - DNA, 201 bp, Homo sapiens
aaaattagagttttacatctgccatttaagacctgcaggacattggcaatgtgtgcattggaggcactggcaacgtcctcgtgtttccctgaagaagaacytttcagcagcaattgtaccctctgtaggaagggatatttcaagagtgtctctgtttcttcatcaccccctttcttgcaagtcttccttattaaaaggctg

SEQ ID NO: 54926 - DNA, 201 bp, Homo sapiens
ccaaatcctggttagtgtctgggagttaatgagccaaagtttctaagagtatgcaagctaggctagatgaccctttgataagagtattacagacctagagstggatagactgtttagccaactaacctgtagattgccttataaaccagaaagtcagggaaataattaatttcctcattcatcaaacctctattgagtatc

SEQ ID NO: 54927 - DNA, 201 bp, Homo sapiens
tttagagtcatcaaatattttcctaaaggagatgcacataatgcacctcatcctttaaatccatctggttaattaaaataaaatcattgaggtgactttgrtagaaataaaacaggctcaggagaggaaaaagagaaataaagatatcaagaactcaagcagcatgagatatggaaagtgaagactggaagccagaggctt

SEQ ID NO: 54928 - DNA, 201 bp, Homo sapiens
agaaatgcagagtacgtgaaagtcagaagcgagctgagaacagagttcatggctagtactctaagctgttctattccttcagtgtgattaacttgctatgygaaaagggggccctgtgtaaagtgaccttgaggtctcttggaaagagtgtggattttggagacagagctctgactttaaatagcatgtctcctattaaaa

SEQ ID NO: 54929 - DNA, 201 bp, Homo sapiens
ttctgtgttctctattctattccactagtttatgtgactgtttttatgccaacactatgctgttttggttactatagctttctagtatatttgatgccagrtagtgtgatgactccaggttttctccttttgctcatcattgctttggctattctggggtcttttgtggttccatacaaattttaagattttttttctgtt

SEQ ID NO: 54930 - DNA, 201 bp, Homo sapiens
caggagttcgaggacagtctgaccaacatggagaaacactgtctctactaaaaagcagacgcacaaaaattagccaagcatggtggcacatgcctgtaatmccagctactcgggaggctgaggctggagaatcgcttgaacccgtgaggcggagcttgcggtgagccaagatcacaccactgcactccagcctgggcaaca

SEQ ID NO: 54931 - DNA, 201 bp, Homo sapiens
gtagggtgctttggcttaggttctgagtaggcataatagcgtagtctgggccgggcatggtggctcaagcctataatcccagcactatgggaggccgaggygggtggattgcaaggtcaggagattgagaccatcctggctaacatggtgaaaccccgtctctactaaaaaatacaaaaaactggccgggcgtggtggcag

SEQ ID NO: 54932 - DNA, 201 bp, Homo sapiens
cagaagactattctccccatttagttgaaaattagagttttacatctgccatttaagacctgcaggacattggcaatgtgtgcattggaggcactggcaaygtcctcgtgtttccctgaagaagaacctttcagcagcaattgtaccctctgtaggaagggatatttcaagagtgtctctgtttcttcatcaccccctttc

SEQ ID NO: 54933 - DNA, 201 bp, Homo sapiens
tttcctgtttggcccctcatgggtattctccctgtagaatagaacctggaaggagggagggtggtcccgtggcatatgggaagccacaaggaacatcagcygagagcacgtctgtaacagtgtgctgggccttcacatccacactgcagtgagtgttcacaagggagctgcagcaaggaagggaactaagtacagaaactc

SEQ ID NO: 54934 - DNA, 201 bp, Homo sapiens
tatgagagcccaactctcatgactttatttaaacataattatcttccaaaggccctatctccaaataccattaccttgggggctagggcttgaactacatrtagattctgagcaggtgcaaacattcaattcctaataaacttccttgtgcacagaagtgtaaatgagaataattataagatgcatcacttctaaactttc

SEQ ID NO: 54935 - DNA, 201 bp, Homo sapiens
cctgtatcctgaaatggctgaagggagagagagagagactctattttctcttcttctttttataagaacactaatctcattatgagagcccaactctcatkactttatttaaacataattatcttccaaaggccctatctccaaataccattaccttgggggctagggcttgaactacatatagattctgagcaggtgcaa

SEQ ID NO: 54936 - DNA, 201 bp, Homo sapiens
ttagcccaacagtgaaatcataaagaaaaataaaggacttaagaaaagaaatatcagataaacaatagtaaatttatgatgtgtattttaggtttggaatkttagttaagctaccatgcagacatatttagtaggtttttttagttgcaggactgagattctggaaatgtatcagttttgaggaattatatataacaaatt

SEQ ID NO: 54937 - DNA, 201 bp, Homo sapiens
tccctgtatcctgaaatggctgaagggagagagagagagactctattttctcttcttctttttataagaacactaatctcattatgagagcccaactctcrtgactttatttaaacataattatcttccaaaggccctatctccaaataccattaccttgggggctagggcttgaactacatatagattctgagcaggtgc

SEQ ID NO: 54938 - DNA, 201 bp, Homo sapiens
ctagtgataatgaatacatctcactagatctgatggttttataaaggggagttctcctacacaagctctctcacctgctgccatgtaagacgtgacttggctcctcaatttgccttcagccatgattgtgaggccccccaagccatgtagaactgtgagtaaattgaacttcttttctttataaattaccaagtctcaggt

SEQ ID NO: 54939 - DNA, 201 bp, Homo sapiens
tagtgataatgaatacatctcactagatctgatggttttataaaggggagttctcctacacaagctctctcacctgctgccatgtaagacgtgacttggctcctcaatttgccttcagccatgattgtgaggccccccaagccatgtagaactgtgagtaaattgaacttcttttctttataaattaccaagtctcaggta

SEQ ID NO: 54940 - DNA, 201 bp, Homo sapiens
agtgataatgaatacatctcactagatctgatggttttataaaggggagttctcctacacaagctctctcacctgctgccatgtaagacgtgacttggctcctcaatttgccttcagccatgattgtgaggccccccaagccatgtagaactgtgagtaaattgaacttcttttctttataaattaccaagtctcaggtag

SEQ ID NO: 54941 - DNA, 201 bp, Homo sapiens
tagatctgatggttttataaaggggagttctcctacacaagctctctcacctgctgccatgtaagacgtgacttggctcctcaatttgccttcagccatgrttgtgaggccccccaagccatgtagaactgtgagtaaattgaacttcttttctttataaattaccaagtctcaggtaggtctttattagaagtgtaagaa

SEQ ID NO: 54942 - DNA, 201 bp, Homo sapiens
aggggagttctcctacacaagctctctcacctgctgccatgtaagacgtgacttggctcctcaatttgccttcagccatgattgtgaggccccccaagccrtgtagaactgtgagtaaattgaacttcttttctttataaattaccaagtctcaggtaggtctttattagaagtgtaagaacgaactaatacaccctgtct

SEQ ID NO: 54943 - DNA, 201 bp, Homo sapiens
ttcagccatatccctctatgcagggtgctcaaaggagccttttcacattttctcctttggcacatgctcacctctgaatggcatgccttccacacctcacscacttggcaaaatcttctcttctctcaaagcacaactcgaatagtccctctttatggaaagacatccatgggcagcacctactccatttcactttatcgc

SEQ ID NO: 54944 - DNA, 201 bp, Homo sapiens
gacgcttatgaaaccatccgatctcttgacactcactttttatcaccagaaaagcatgggggaaaccaatcccatgattcaattacttccacctggtcctkcccttgacaagtagggtatatagggattacaattcaaggtgagatttgggtggggacacagagccagaccatatcactacactaacccttcatagttgga

SEQ ID NO: 54945 - DNA, 201 bp, Homo sapiens
ttgttgtggaagcactggtgcattacagcagagagatgcattgtgtatgatgagtcatgccccacaaatttgtgctcagtctctgtacggtaagaaaaaamataacaagatcaagtaacagagaactggggagggagaaagttctcattgcaggcacaagtacaccgccactttgtgcaaggtaaagagggcttacacaca

SEQ ID NO: 54946 - DNA, 201 bp, Homo sapiens
accatatcactacactaacccttcatagttggaagtatttttttctaattaaagatataaatagcatttttaaatctgaatgactaatataaaatatgccyatacttgctaaatgaaggaggttttcttattgattgaaatatcaaaataagattttaaaaataaaatgaaataaaaaagggagaatataagagactcacc

SEQ ID NO: 54947 - DNA, 201 bp, Homo sapiens
tactagctcagatcacagacttcagggaaaacattaacaaaaaatcctgaatgaaggaaaaatgatttggggagaattaccgctgggctacttttaagttrtgaaactggggtgaagttagacaaactctctgaaactcagttctctcatctgtaacatcagacaaataatgcatatattaaaatcttgaatttcatgacc

SEQ ID NO: 54948 - DNA, 201 bp, Homo sapiens
  misc_feature (199)..(201): n is a, c, g, or t
ggggcagggaggtaaactctactcattgaaaaaccattgcaagggtatgcatatgtaataatactccaggaaaatgaagaactgggatttataatccaacytaccacacattccattgcatttgaaagcgttattcgaagagctgcaatgcttatgttcaatagttaaggactattaaaaactaaatataattcataannn

SEQ ID NO: 54949 - DNA, 201 bp, Homo sapiens
atggctctggcaggtctctgtatctggtgaaggctttctttctctcttggagactactagcttctccctgtatcctgaaatggctgaagggagagagagasagactctattttctcttcttctttttataagaacactaatctcattatgagagcccaactctcatgactttatttaaacataattatcttccaaaggccc

SEQ ID NO: 54950 - DNA, 201 bp, Homo sapiens
ttccttcatgtaactcacaggctcccaaagctcttatccaagataggggtgagttacccatcgggactggagaggaaaaggagaaagtgaaaggagatatrtaataagatagaaggggattcaggaactttgcataatattttagataactaactatatgtttttgcatgctgtaaatatcagtgacctggggcaaactca

SEQ ID NO: 54951 - DNA, 201 bp, Homo sapiens
caccaggatggaatgcagtggtgcgttctcggcttactgcaatctccacctcctgggttcaagcaattgcctgccacagcctcctgagtagctgggattaygggtgcgcaccaccacatccagctaatttttttgtattttagtagagatggggtttcaccatgttggccaggatggtcttgatcttctgaccttgtgatc

SEQ ID NO: 54952 - DNA, 201 bp, Homo sapiens
acactcgattagaatatctgcattgatcattataatcaatgatggcttcactacccagccctatgttactaaaggtagaaaaatgcccaaggaaaatctcrgttctttaaacagcaagagtcagaagtatttatggtatcattcttcttgtctaatatatgtggtgagctacccagaagtcggagtgaaaaatatttcagg

SEQ ID NO: 54953 - DNA, 201 bp, Homo sapiens
gctcttggtccaggagggtacatgtgatgcacatcagctctgctgctggaggaggtgggatcaccagtgtcactgggtgctaggcagccatttctaggacygtagagtatacatgttgctccccacattcctgaaagcagctttcccactgcactggacaacctgtttagggtactatgtgggctcaagtgctgatgtgga

SEQ ID NO: 54954 - DNA, 201 bp, Homo sapiens
agccgagattgcaccactgcactccagcctgggcgacagagcgagactcctgttcctccaaaaaaaaaaaaaatatgtatatatatatatatatatatatrtgtgtgtgtgtgtgtgtgtgtagtgtaatctgtatgtaattaccatcagcactgtctgtgagtcccttagtggcctacactgtaggtgtttgtggaagta

SEQ ID NO: 54955 - DNA, 201 bp, Homo sapiens
gtcatacttcctaatgcttgatcatcatcataccacgtattagtccatttgggcttttataacaaaagatcataaactgggtggcttaagcaataggcttytatttctcacagtctggaaggtggaaagtccaagatcatggctctggcaggtctctgtatctggtgaaggctttctttctctcttggagactactagctt

SEQ ID NO: 54956 - DNA, 201 bp, Homo sapiens
ttttgtggaagttgtcagagtcaaaataaattcacttgtgttaacagcaatacaaaacaaaaacccaaaaaacagagccagagaaggccatgaaggattawcatgcatgaatgcctagtaacaaaaacaatcacaaaagactacaaaaaccacaaccttgcacaaaggccatcactaccttacacaccaaaaaactgctca

SEQ ID NO: 54957 - DNA, 201 bp, Homo sapiens
aagtatttacagagaatctgctatgtgccagacactggaaaaatcctagggcatacagttgtgaaacaaacaaatctgtttttattttcattggatgatarcctaagtttttggatatgagaaggaagcagaaaaattgagtgtttaagaactcaagctctgaaatcagcctgcctagttcaaatccaatctccaactttt

SEQ ID NO: 54958 - DNA, 201 bp, Homo sapiens
ctagatctgatggttttataaaggggagttctcctacacaagctctctcacctgctgccatgtaagacgtgacttggctcctcaatttgccttcagccatgattgtgaggccccccaagccatgtagaactgtgagtaaattgaacttcttttctttataaattaccaagtctcaggtaggtctttattagaagtgtaaga

SEQ ID NO: 54959 - DNA, 201 bp, Homo sapiens
agatctgatggttttataaaggggagttctcctacacaagctctctcacctgctgccatgtaagacgtgacttggctcctcaatttgccttcagccatgawtgtgaggccccccaagccatgtagaactgtgagtaaattgaacttcttttctttataaattaccaagtctcaggtaggtctttattagaagtgtaagaac

SEQ ID NO: 54960 - DNA, 201 bp, Homo sapiens
aacacatgtcagacaagggaatagaacctaaattgagcacctgcaatagaggactaaattatttaaagttaaaggacaccttccatgtattagaattactwaagaacaagaaataatttgtttcaatatatcttatgatactatgagtaatacttctgtagattgaacttagtctattttcttattccctagcttcagata

SEQ ID NO: 54961 - DNA, 201 bp, Homo sapiens
aacaaaaacaaataaattattgtgttaacttttgtttttagcagagttaggtgggaggagataagtttcacagaaattaaatgagtctagttcaaaatagaaaaaaaaaactatgaatccttaaagatatgaactcaatgccagcggaaaaagagaagaaaatgtattaagaatgtgacatccacaattctgctgccaaac

SEQ ID NO: 54962 - DNA, 201 bp, Homo sapiens
taataaataatcagtaaaccagcaaagcaagcaagagtagaaggagtattatataggttttgaagtaaataattaaagatgacaaatcaccctagaaatarcattttctgatttgaaaactgttccaattttgggtttgtgcatgcatttttcccaagtaaggcagagggcatggtaaatgacataacagaattaaggagg

SEQ ID NO: 54963 - DNA, 201 bp, Homo sapiens
tgtgtttaccactatgtacaatttctataccacaaacgcagtgggccacaccttcctgtgtattctttgtttttccgtgtgtgtgtgtgtgtgtgtgtgtktgtgtgtgtgtgtgtgtcttgaactgcacattcttagtgaaaaatgtggtcattttgaagtcattttccatgtgttaagcagactgaccatggcttcctg

SEQ ID NO: 54964 - DNA, 201 bp, Homo sapiens
ctccacttaaagttcaatgcataataacatcagtctttcattgggggatccagtattttaaataacagaatgatggatgggaccaccgcttcagccttgcrtgaaaactgcatgtttcaatcaaagtattaacaagttcatgatgtgtttcctgtttggcccctcatgggtattctccctgtagaatagaacctggaagga

SEQ ID NO: 54965 - DNA, 201 bp, Homo sapiens
atgccagactggtgacagactgagactccatctcaaaaaaatgaaataaaataaaaataaaaataaaataggataaaaaagtatagtaggttgccgcttcrtgcaacctaaaattacaagtggaatggcatcacctttactactttggatatatgttatttttctacattttgaaggcaatcatgcattgcagcgcactat

SEQ ID NO: 54966 - DNA, 201 bp, Homo sapiens
atgcatataagacacaaatttattaacacaaatatgtcatatcacttgcataccagacaattgagacatgggtatgttgtgtgtatatccagctctttttyccagggaaggtgggctaaactaaggcatgcattcccatggtaaaagtgctgactgcaagccggaccctggaacaaggggatgtagggcatggagtgaggg

SEQ ID NO: 54967 - DNA, 201 bp, Homo sapiens
cttgaggacaacagggagaggaaatggggttgggactgtagtgacagacaaagcatttcttgacttggaaagggagcccagggaaggagagggaggagacsggtgagttgggaagccttctgctcacagagccaaccacttgtccatcatctggaggcctttttggtggcacagctgctccccgaggttttggcaagggga

SEQ ID NO: 54968 - DNA, 201 bp, Homo sapiens
tcggagcagctttaatctagaacttgagctgcatctggagttccaggaagaagaatctggaatctctcctggagatggacgaattggaagcaagaaggagrgatttcgaggataagccctctaagaggggcctgcatccaaacggggatgcagcgtggacgacttaccggggaggagggatggacaagccaatggcagctg

SEQ ID NO: 54969 - DNA, 201 bp, Homo sapiens
tgaagccagcccctcctgccccagcattggtgctgctgatgacggctggaatggatgagagaagacctcagcccccgtcagctctagccccacgtcagagycccttcttgggcatctcgggccacctcctttactctcgcccgcagtggcttcctgctgagatggattctctctgttgtgtgtttcagtctactaagagat

SEQ ID NO: 54970 - DNA, 201 bp, Homo sapiens
gaatttggatattcgccagacatcctgaagaaggagaagaaaaacaggtaaatcccccataaataatcaccccaaccacctggaagtcacctctgtgaatragcctctccacgcagaatgtgccttcccaaacccatcctagcctcctttcttcccacacatcccagtgcgacccccaccaagaaatagaaaactgagatg

SEQ ID NO: 54971 - DNA, 201 bp, Homo sapiens
cttagtgctcagcacaacctgcacgcccctccagggctgccctggtagcttgcctaagtcttggggatgggctcacgttccacagatgagttggagcctcyggtcagagctgtcctcctgcacaaagggtcatgggagcctcctggcttccccgagtacttgcctccttctccagggctgcctgagatctgtctgccagtt

SEQ ID NO: 54972 - DNA, 201 bp, Homo sapiens
ggatttcagcctctacttcccccgcactgagacttagtgctcagcacaacctgcacgcccctccagggctgccctggtagcttgcctaagtcttggggatrggctcacgttccacagatgagttggagcctctggtcagagctgtcctcctgcacaaagggtcatgggagcctcctggcttccccgagtacttgcctcctt

SEQ ID NO: 54973 - DNA, 201 bp, Homo sapiens
cccacattgcagttataactgggaaaagaaacaaatcaacaaaaggattcagatccacacctggccgactgcaaaatgtgtgtacctccacactggacttmtaaggtccctttcagtcctatatccaccacgctatggttcagttcctgagctcggagcagctttaatctagaacttgagctgcatctggagttccaggaa

SEQ ID NO: 54974 - DNA, 201 bp, Homo sapiens
tctccctcctctctgctgcagcccagctcaggaggggcatgctccacccttcccacctggagagagaaacatcagagcagtttaaccaagtggttgcaggrccatatggtgcctttatgccaatcagaaaaaggcaccccttcctctgggcagacgcagccctttcccagggtgcatggctggatttcagcctctacttcc

SEQ ID NO: 54975 - DNA, 201 bp, Homo sapiens
tatgagaagaaagcaggtggctggatggcatcaatttttttttaattccaatccctctcactcaatgcctattctgctacaggcactgtgctgagtgaaawcccagacaggcagtcagcatggtcaaaattcccatttcttggtgtcatattagtgtagagcatattgtgcagtaagcctctatttattaaacacttagca

SEQ ID NO: 54976 - DNA, 201 bp, Homo sapiens
ttgggccataatctctcatcatcttcctggaggataagaatccccttctgcagagcacctcaccagagggaaataaaaagcagccccgtgaaaaatcccartggccgtaaccatcatgtctgtagtttgaagatgaatagtgaatgtcatttttctctagccctttggcctttgactgctcctgggcacagaacaacagtt

SEQ ID NO: 54977 - DNA, 201 bp, Homo sapiens
tggaagacacaggtaccccagggaacccaagggagctgagtcaattgggccataatctctcatcatcttcctggaggataagaatccccttctgcagagcrcctcaccagagggaaataaaaagcagccccgtgaaaaatcccaatggccgtaaccatcatgtctgtagtttgaagatgaatagtgaatgtcatttttctc

SEQ ID NO: 54978 - DNA, 201 bp, Homo sapiens
tttccgttaaggaataggctctgtgttgcaagaggagggctgtggaagacacaggtaccccagggaacccaagggagctgagtcaattgggccataatctstcatcatcttcctggaggataagaatccccttctgcagagcacctcaccagagggaaataaaaagcagccccgtgaaaaatcccaatggccgtaaccatc

SEQ ID NO: 54979 - DNA, 201 bp, Homo sapiens
ggaggcagagatggcggcgcaggcctagacagttcccttctccctgtagacagtgtggcatcatgcgagggtcctgaggggaagcagtttcacagggccartgctttccgttaaggaataggctctgtgttgcaagaggagggctgtggaagacacaggtaccccagggaacccaagggagctgagtcaattgggccataa

SEQ ID NO: 54980 - DNA, 201 bp, Homo sapiens
ctgaggtaggggttgctaactggaaggtcggccagattgggcaggtgcatggggcatccctgagacaccgagaggcccaggcggattataaaggaaggctygacttgggaagcagagatggaggcagagatggcggcgcaggcctagacagttcccttctccctgtagacagtgtggcatcatgcgagggtcctgagggga

SEQ ID NO: 54981 - DNA, 201 bp, Homo sapiens
taaaatctcctgctggattctctctcctcccacaaggtatcatcatgggaaaccttcaaatggctcccttttacctcctgcgttaggtctaaaccccaagrcttacctattcctacccagtggtgtaccctgctccctgccacccctgctgagcagcgagctgcctgccccagataggcaagcccacctgcacacgtgctg

SEQ ID NO: 54982 - DNA, 201 bp, Homo sapiens
aaaagacaaatattccaaaagacaaatgatctcattcatgtgagatacttagagtagtctaagtcagagacagaaagtagaatggtgggagccaggggctrggaagaggggagggaagaaatgaggaattagtgttaagtgggtatacagttcccatttcactagatggaaagcgtgttctggaggtggacagtggtgatg

SEQ ID NO: 54983 - DNA, 201 bp, Homo sapiens
ggaccaggcaccacagaaatgtgggtggtggagtctcagccaggccacacaggtgcgcaggctgtccatcacgggtaatggacatctgaggttgagaaaawgatatgtgcaaaggccctcaggtgtgaaaagtctggcctgcatggggaaaggctggagaataaggtgggaaacgacacgggggagacaggatctcgggca

SEQ ID NO: 54984 - DNA, 201 bp, Homo sapiens
ggaggtaagagtactaaccattttatttaaagagcttacctcttccatcccttattattctcaaagaatgcattacaggacatttgtgagagtatggtaaygaaatagagcattggtaagaaataattaatgctaaatggataagcaaaatgtggtgtatacatacaatgggatatcattcagacttagaaagaaaaaaaa

SEQ ID NO: 54985 - DNA, 201 bp, Homo sapiens
gggtcttcaaactgggattcccatacccctggggcacacataaccttgcttaagaggatgcaggcaaggacatagttaaaggaatcaatttccagctcctytgtgcctgtgcattctgtcttaaaactacctgcctcagagagcacctgtggttgagatgtcatgcagattctactgtccctctccctgtcacaattagcc

SEQ ID NO: 54986 - DNA, 201 bp, Homo sapiens
aaatggcgtgagttccttaacctgggggtgactgtcctagggccccagccaccaagaagcctgcagaccaatgagaggaatctacacaaagaacttaaagyagagccaaagctctggaatgacagaaaagcattatgaaccacgaatcagaggtgcactgaggaatggctcatcttgattagggtttttggggatctccag

SEQ ID NO: 54987 - DNA, 201 bp, Homo sapiens
ggcattgcgatgcctgttgctaacagagagggaggaactatgctcatggaatttgtgaatcggccaaatgtagagtcgtagagttgtccctgtgtttgccygcagagcatggagggttgtgggggcaccagaaggagaacaggctcagatctttccgctgggcaattctatcactagcagagcagacctggttctcagaga

SEQ ID NO: 54988 - DNA, 201 bp, Homo sapiens
cacccagtagggccttggtgaatgtcaggggcaccaggttgaaagctttctccctcccaattcttggtccacaccaccttccagccaggggccagaaaccwcttgttaaaggagcagatctcacaagagaggtcagccaagtccttaccccttcataaaggcacttgaagaatttaatctcatctgtcaaggagtccacct

SEQ ID NO: 54989 - DNA, 201 bp, Homo sapiens
ttatagctcaggtagtgtgggtacagtgcaatgttaaaaaattatttcagggctgggcatggtggctcacacctgtaatcccagcactttgggaggccaargagggcagattgcctgaggtcaggagtttgagtccagcctggctaacatggtgaaaccccgcctctactaaaaatataaaaatcagccgagcgcagtggt

SEQ ID NO: 54990 - DNA, 201 bp, Homo sapiens
gccgtgataggagaagggctaagccccatatatgtccgcaaaacaagccaagactgtagttaatctcccttacccctggggtggcatttccgcaaggcccmacttcaagacaaaggaggtcttgactgagcccaaatacacacacacacacaaacacacgcacacacacgtacacatgcacacatactgagagggtgctag

SEQ ID NO: 54991 - DNA, 201 bp, Homo sapiens
catcctcctctgctgggcaggcccacagcagtgccaatgccctcgtattttggatgagtggctcacagcctcaaggagatgcctaggacccagccttctarccacagaaaaccctgccccacccttgggactgtagaagttttaatcattcatggagtggccacacacactgtcacctgaactcatcaaactgtcttctgt

SEQ ID NO: 54992 - DNA, 201 bp, Homo sapiens
agccctttgcagcaacaaagctcttctgatagcaagtggaatatgctgcccttgcagagtggagtggtctaatttggagtttatctgtgctccctaattarggacctgaagagttatcccctgaagagatctcctagctttatttttccagtgctacctccttcttgcttaaccatcagcaaggagcaggggaaatgcctg

SEQ ID NO: 54993 - DNA, 201 bp, Homo sapiens
tgaagccgtaacctccagcccgaacgccgccaccagccacattgaaagaaatacgccgattccctccaaggctatagaggctccgactgccaaagccagcrccagcccctctgccagctgcacagtaagaagccaggctacccacagccttccttggcaccactgccgaatgcacactgaagttgcccttgtcaccactgg

SEQ ID NO: 54994 - DNA, 201 bp, Homo sapiens
tcctgaggcccagctgcacctttccagccacagtgtgcagtccattcccaggcagcaggaaaactgctcaggcctcagggtgcggcctcatcctcctcctrtgagacccaccttgtcaatgaaggaggcgaacttgtcgttcagcaccttgatctgttcccgctcctgggcgcgcaccttctggatctcagggtccagctc

SEQ ID NO: 54995 - DNA, 201 bp, Homo sapiens
tggtttctagaacctggttctgctgctctaggaagcgtacctggaacccaaatcaacagacacctggaaccacaatgggtgcagtcatgccccctggacamacaccattgactccccaggtttgccatagattgttgtagtcatttttgctcatgtcttgactctccacccttgccattccacacaaactagatcctttac

SEQ ID NO: 54996 - DNA, 201 bp, Homo sapiens
gcaggttgctgatgtagccctcaaggatgggctccaggttcttcttgcagttgttcaggtccagctgctgcagcagctcccacttggtttctagaacctgsttctgctgctctaggaagcgtacctggaacccaaatcaacagacacctggaaccacaatgggtgcagtcatgccccctggacacacaccattgactcccc

SEQ ID NO: 54997 - DNA, 201 bp, Homo sapiens
cctcaccctgtccccagacagtgtctccagctgcttccgcaggttgctgatgtagccctcaaggatgggctccaggttcttcttgcagttgttcaggtccwgctgctgcagcagctcccacttggtttctagaacctggttctgctgctctaggaagcgtacctggaacccaaatcaacagacacctggaaccacaatggg

SEQ ID NO: 54998 - DNA, 201 bp, Homo sapiens
gcacaggaactgcttcctatcaactaggcaggaagttatcatcaaagaggataggcccttccccctagccagagaaagggatgtgagctcctgaccctggwgcatactcccccatctcctaaaaaataatggcacagagatcaggtgagcccagaggcacgggaaacatggtctgtgaccctcgggtggagcctgctcacc

SEQ ID NO: 54999 - DNA, 201 bp, Homo sapiens
cacctgcactcctcgctctccagcagcttgcggtaggtggcgatctccatatccagggccagcttcaggctcacgagctcctggtactcacgcagcatccrtgccagctcctccttggcctggtgcagggcgccctccagctcatccagcttggcccgggcatctttcagggcgcagtccccccgctgttcagcgtcggcg

SEQ ID NO: 55000 - DNA, 201 bp, Homo sapiens
tctccatatccagggccagcttcaggctcacgagctcctggtactcacgcagcatccgtgccagctcctccttggcctggtgcagggcgccctccagctcrtccagcttggcccgggcatctttcagggcgcagtccccccgctgttcagcgtcggcgatggccgtctccagatcggcacactgaggggcaaacagatcca

SEQ ID NO: 55001 - DNA, 201 bp, Homo sapiens
tggcctggtgcagggcgccctccagctcatccagcttggcccgggcatctttcagggcgcagtccccccgctgttcagcgtcggcgatggccgtctccagwtcggcacactgaggggcaaacagatccagcacttaagagtcagagcccagttctgagatcttgcttggacaacctccccttgttttgtcctgactgatgg

SEQ ID NO: 55002 - DNA, 201 bp, Homo sapiens
tttcagggcgcagtccccccgctgttcagcgtcggcgatggccgtctccagatcggcacactgaggggcaaacagatccagcacttaagagtcagagcccmgttctgagatcttgcttggacaacctccccttgttttgtcctgactgatggcaactgcttggagatcctcctggtttatccaactttggccatccctaga

SEQ ID NO: 55003 - DNA, 201 bp, Homo sapiens
actgcttcctatcaactaggcaggaagttatcatcaaagaggataggcccttccccctagccagagaaagggatgtgagctcctgaccctggagcatactcccccatctcctaaaaaataatggcacagagatcaggtgagcccagaggcacgggaaacatggtctgtgaccctcgggtggagcctgctcacctcttctta

SEQ ID NO: 55004 - DNA, 201 bp, Homo sapiens
cacacttagagtttggtccccaaatcccaaagagaactatgctaaatggcaacaggcttagaagatacctttacttaactgggaacggaaaaccaaacacygcatgttctcacttataagtgggagctgaacaatgagaacacatggacacagggaggggaacaatgcacactggagcctgttggcaggtggagggagata

SEQ ID NO: 55005 - DNA, 201 bp, Homo sapiens
gagatttttatcagcactgatcatacagcttcagttttcatgcacttagcctcacacattttaccttttcctattagtgtgtgaatttcccccatgggcargaccaaatgaagagaggcacttcccagggcccatctggtgctgctggtctgctgatgaggaaaggggccactgagggccctgtctctcagcaccacagca

SEQ ID NO: 55006 - DNA, 201 bp, Homo sapiens
tgagcaatgcctagctcactaaatatttgttaattgagcactatttcatatacaccttagatagagaggctacaagcatatatacacacaggccttacatrttagggtgaaaaggaagttggttaaaagaagaggaagacagggccattgtgtgggagcaggactggggagtgagtggtgggtggtggagagtgagacagt

SEQ ID NO: 55007 - DNA, 201 bp, Homo sapiens
ccacatctggccttcccttagagcaggaggataaggccctaaattataggcacaacctcagaagctggactctgatgaacatctggggggcattgcgatgyctgttgctaacagagagggaggaactatgctcatggaatttgtgaatcggccaaatgtagagtcgtagagttgtccctgtgtttgcctgcagagcatgga

SEQ ID NO: 55008 - DNA, 201 bp, Homo sapiens
gcctgcatccaaacggggatgcagcgtggacgacttaccggggaggagggatggacaagccaatggcagctggtttgcaggagaggagggaccctcaacawctctggtgctcctggaagctttgctaaatgtgaatgtaagaactgaggggcagtgcagaacaattgtcctttgtgtagttgccactctataggtggcaga

SEQ ID NO: 55009 - DNA, 201 bp, Homo sapiens
ttacgggccggacttcgtgtgaggtgaagaccccataggatagatacagtccctgccctcctggaaatgctaggaaaatccatgtccaccaaccctttctscaaatgacaacgtcccaggggagaaacaggaagggaaaagggtgggcatgacctcagtcaccatttcacaggatgaaaagggagaacatttcctttgaag

SEQ ID NO: 55010 - DNA, 201 bp, Homo sapiens
gatagggattatctagatactattttgtagagtactcaactatcccagttttcctagggctgagaggttttccagaatgtccgactttcagtgctacagargttctggaaagttctgcactgttctggaaaaaactggacccttgaaaaccagaacgtcattcaccatattggagagctctgagtacccgactctccagtg

SEQ ID NO: 55011 - DNA, 201 bp, Homo sapiens
aaccctctttaactaacttcatttacagttgaagaaacagaggaacttacccatctcactcaactagtaagtcagagctgggccggaattcaagtgcgtcyggtttcaaagtgcatgttcctgaccatcgtgttatgtgatagagatggaagttagtggcaaagatgcaaagacattgtggtacatgtggcaggcatggca

SEQ ID NO: 55012 - DNA, 201 bp, Homo sapiens
gatctccagaagccaggcttatattcccaacaacgcccactacaggtgctggctcagagtagtggctcagaggtagtggggctggaagtattccttatggyagtagtagcaatagtggtagtaacatcattgtataatagtgatggtagtaacagaaagtgttaacacttattcttcacttcacatgtgccaggcatggga

SEQ ID NO: 55013 - DNA, 201 bp, Homo sapiens
catttaatccgcagaaccaccctcagtagtcaagaagcactacagagatgaactgagagcctattacgggccggacttcgtgtgaggtgaagaccccatargatagatacagtccctgccctcctggaaatgctaggaaaatccatgtccaccaaccctttctccaaatgacaacgtcccaggggagaaacaggaagggaa

SEQ ID NO: 55014 - DNA, 201 bp, Homo sapiens
cttgtctcctagtttttgcatgttaggaaaacacccaggtgcctattgggctcccgacaccagcaactgaacatttcagtgggtcaaggagcacaggaacygcttcctatcaactaggcaggaagttatcatcaaagaggataggcccttccccctagccagagaaagggatgtgagctcctgaccctggagcatactccc

SEQ ID NO: 55015 - DNA, 201 bp, Homo sapiens
tcatttaatccgcagaaccaccctcagtagtcaagaagcactacagagatgaactgagagcctattacgggccggacttcgtgtgaggtgaagaccccatmggatagatacagtccctgccctcctggaaatgctaggaaaatccatgtccaccaaccctttctccaaatgacaacgtcccaggggagaaacaggaaggga

SEQ ID NO: 55016 - DNA, 201 bp, Homo sapiens
gtgctccaaaacttttggagcattttatttaaaatttgtacaaaattatctttagcctacgcagaaggtatatatgaaacataaatgaagttcatgttttratttgggttccatccccgaagtatctcattatgcacatgcaaacatttcaaaatccaaagtcaggaatgtttctggtcccaagaattttggataaggtat

SEQ ID NO: 55017 - DNA, 201 bp, Homo sapiens
ccttttggtatctccctggaagagtcgggaaggaggcagggtgagggtggggggacaggagtgtccttactgcatcatacagacacttgaggaacttgatktctttgtccagtgagtccactttggcctgaagctccaccttgactgcgtaggctgcatctgcatcctgccaagaggccccagagtcattgggggatgcaa

SEQ ID NO: 55018 - DNA, 201 bp, Homo sapiens
tttgggatacagggtccctgcagggtctctggggtgagcagtaagaggctagtgacaggagtaagatatccctgagttgcttcacttgtctcctagttttygcatgttaggaaaacacccaggtgcctattgggctcccgacaccagcaactgaacatttcagtgggtcaaggagcacaggaactgcttcctatcaactag

SEQ ID NO: 55019 - DNA, 201 bp, Homo sapiens
atgggggtgcgagagaccctaataaggaggctcctccctcccttaccttcttaagcaccacaaactcattctctgctgttgtgcgccggttaatctccacytcatatctgccagcagggagagtagatggccttagcccccttagccaaggaactttctcttcctgctggccaggcaaatgtttgggatacagggtccctg

SEQ ID NO: 55020 - DNA, 201 bp, Homo sapiens
gtcctgagcagagttgttaagatgggggtgcgagagaccctaataaggaggctcctccctcccttaccttcttaagcaccacaaactcattctctgctgtygtgcgccggttaatctccacctcatatctgccagcagggagagtagatggccttagcccccttagccaaggaactttctcttcctgctggccaggcaaat

SEQ ID NO: 55021 - DNA, 201 bp, Homo sapiens
caccaggcaccagccccctccccagcctcctgggctgaagtcctgagcagagttgttaagatgggggtgcgagagaccctaataaggaggctcctccctcycttaccttcttaagcaccacaaactcattctctgctgttgtgcgccggttaatctccacctcatatctgccagcagggagagtagatggccttagccccc

SEQ ID NO: 55022 - DNA, 201 bp, Homo sapiens
tgcagacgggtgaataatgcattttccacaatttcacagaatccaaggctctgtgctttgtaagacctcactgggttatcttttcctgcctgtgggcaagkccactattgtatcaagatcaatttcctcctgtatgtatggcctccaaggaccagcatcctgcacttccatggtctcctggtgcagggttttgtacctttc

SEQ ID NO: 55023 - DNA, 201 bp, Homo sapiens
cgctggcacatgcagacgggtgaataatgcattttccacaatttcacagaatccaaggctctgtgctttgtaagacctcactgggttatcttttcctgccygtgggcaaggccactattgtatcaagatcaatttcctcctgtatgtatggcctccaaggaccagcatcctgcacttccatggtctcctggtgcagggttt

SEQ ID NO: 55024 - DNA, 201 bp, Homo sapiens
ctgcattgagagaggaagacagattcagcaaccccctggcttccctcttctgccccatcagtcttctgggcccatggtccctggcccaataggctgctagratccacggggacaaagtagggggaagaagtgccctctgggatgtgtctgcagagctgagggagagcagctaacagcagcaggaacccctgcatatggcag

SEQ ID NO: 55025 - DNA, 201 bp, Homo sapiens
ttttttccttgaagccttggttggaacctttctttcattcagcatgcccacaaaagtattcctcacattcactgtgcaggtgacccctcccaggaagcgargggctgctgtgggaggagacccattcggtgaccaccttggtctggtacagggcctcggcctcggccttgctcttcagggcgatctcctcataatgcatgc

SEQ ID NO: 55026 - DNA, 201 bp, Homo sapiens
catggctacactcccgcaagtctgtgattctccctctgccctgtggcaacatgcccccattcctataagtgtgtttgttttaccacctcacttctttcacmtgcaacagagaggaacaggcagttcgtggatggaggaaagaagtgagggatcctctctgttgcatatattcaatccataccagtttcatgatttatcttt

SEQ ID NO: 55027 - DNA, 201 bp, Homo sapiens
ccctaaggagggcactgtgttttaccctttcttcatattctgtctggcccagattgtgactcaataaatactgttagtggattaatttcatagaacccacytgcttcttcacattccctatctctgagcggatcctctggatcaggcggttgagctcagagatttcagccttggtgagcttgaggtcatccccatgctggc

SEQ ID NO: 55028 - DNA, 201 bp, Homo sapiens
ttccctatctctgagcggatcctctggatcaggcggttgagctcagagatttcagccttggtgagcttgaggtcatccccatgctggcctgctgtgacctscagctcctggatctgaggttgggtgacaagagaagaggaacacaaggatcctactgaactagggcaggtcccttttcttctggacagaaaggatcctgcc

SEQ ID NO: 55029 - DNA, 201 bp, Homo sapiens
ctgagagggtgctagctgtggccagtgggactcagcacacctggcaccagctcaccttggtctggtacagggtctcagcctcggccttgctctttagggcratctcctcgtactgggcacggacctcggcaatgatgctgtccaggtccagatcccggttgttgtccattgacaggacgatggacgtgtcgctgatgtggg

SEQ ID NO: 55030 - DNA, 201 bp, Homo sapiens
tctgctaagaattccttttttccttgaagccttggttggaacctttctttcattcagcatgcccacaaaagtattcctcacattcactgtgcaggtgaccmctcccaggaagcgaggggctgctgtgggaggagacccattcggtgaccaccttggtctggtacagggcctcggcctcggccttgctcttcagggcgatct

SEQ ID NO: 55031 - DNA, 201 bp, Homo sapiens
atgagacacccagtgttgttgatgaggccagtgatagaggaggaaggagagttggggacctcccacaggaagggagggcctaggtggggctcctgaggtgyctgtgtttttcgggagggaaaaaaggagagactgaaggaaaccaggacagggccacagctcactagggggactaaacccccaatccccccagtcccgctt

SEQ ID NO: 55032 - DNA, 201 bp, Homo sapiens
ggccaaatgtagagtcgtagagttgtccctgtgtttgcctgcagagcatggagggttgtgggggcaccagaaggagaacaggctcagatctttccgctggkcaattctatcactagcagagcagacctggttctcagagaggtcacaggaaggatcctccagcctccaatatcatctccccactgacgcagtgtttaaaat

SEQ ID NO: 55033 - DNA, 201 bp, Homo sapiens
aaagttagatagtgcctgagaccggaggccaccagtatctacagattcaaaatactacaggttcaggaaaatcatgcccgatcccctagcaaggccagccmtgaggatgagacagtatgccacggtcccactgtgatcagattcctgctgcaggacctctccccattggggatccttctgatctgttagcatccagatgag

SEQ ID NO: 55034 - DNA, 201 bp, Homo sapiens
tggtttctaacagggagctgattgtccctttttcatatattttcaatatattctttttcaataatagccatgacgggagggagcaatgcagtgactcccarctggtgaccaagtgagggaatcaaattcattcattcattcattcaacagctctgagaccatgaaagcaggagaagtcatgacagtttagacctgaaagaa

SEQ ID NO: 55035 - DNA, 201 bp, Homo sapiens
gatgtcatatctaagaattcattgccaaatcaaggtcacaaagatttccctctacattttttctaagagttttatggttttagctcttatatttaggttgwtgattcattttgattaatttttgtatatgatgtaaaatagagattcaacctcattctctggcatgtggatacctcgctgtctcagcaccatttgttgaag

SEQ ID NO: 55036 - DNA, 201 bp, Homo sapiens
agcaatcatgaataaaggacgactttgcgggggggggactctggatgccaggctgtgcacatgatggggagccattgagggctactgagccagggagggcmtgagcaatccatgtttgaggcagcagaatccaggtgctatgtggacagggttggtgggggtggagagaggctggaggcaccgagagaggggcaggtggtt

SEQ ID NO: 55037 - DNA, 201 bp, Homo sapiens
gccaccactcagccgcacagtttgctcggtctctctaagcctcaacttccccagctgtaaatgggaaataaactcctggtgagatagttgtgatgataacmtgttaatccatagaaagtgcctgctttataaaatacataataaatgttatcaacaactaaaagcagagagctcagtagaattggggaattggcctgtcct

SEQ ID NO: 55038 - DNA, 201 bp, Homo sapiens
tatctcccgatctcctctgaccccaatcccactgctcttctgaactcctgcttaaaaccctggattttgcagtctcccctccccagcgtcccgactcctcygtcccttgacacccatgtgcaggttgctgtttcctagggcctgggtcctgggtcctgggtcctggggagggtcccatgtcccagtcaattcctccttctg

SEQ ID NO: 55039 - DNA, 201 bp, Homo sapiens
ccatagaaactaaagatagcaccttaacatatgtcccagagttgtttgtcagaaacccaaaccccaccaaaagggatgcctgggcacatagacctcagatraagggacactgggcactgagctctgaccaccactctttgttctaaatttcttcctgaggggcctgaagaatgtcacacctacaagccagagctaacactc

SEQ ID NO: 55040 - DNA, 201 bp, Homo sapiens
ctggggccagttcagcagcctcttgggatcaggctcccagtctgttccaaggatgctcattgcatcttctttgcaggaatggatgagaacaggaggcaatrtgtgtagggtgtctggcatctagtaggtgcttgacaaatgatggtagctattgctgataatgaaggaggtgggtgggtgacacaggctggcagagaatcc

SEQ ID NO: 55041 - DNA, 201 bp, Homo sapiens
taggtgggtgactggggccagttcagcagcctcttgggatcaggctcccagtctgttccaaggatgctcattgcatcttctttgcaggaatggatgagaayaggaggcaatatgtgtagggtgtctggcatctagtaggtgcttgacaaatgatggtagctattgctgataatgaaggaggtgggtgggtgacacaggctg

SEQ ID NO: 55042 - DNA, 201 bp, Homo sapiens
aaatggggttgggactgtagtgacagacaaagcatttcttgacttggaaagggagcccagggaaggagagggaggagacgggtgagttgggaagccttctkctcacagagccaaccacttgtccatcatctggaggcctttttggtggcacagctgctccccgaggttttggcaaggggatccttgagctcactgccacag

SEQ ID NO: 55043 - DNA, 201 bp, Homo sapiens
gggcacaggagggaagaaaatctggagacaggctggtttggggctctctctcatattgtttaggggaagagcctggactccagtccctcccaatcctctgmattccttcctctactcttgcccctgccattttgtcttctttgctcttactgaaactacccgaattttcctatccctgccttctctctttctcaccttctc

SEQ ID NO: 55044 - DNA, 201 bp, Homo sapiens
gcagaaattcagagtctttaattcaaacaaaagaggaaatagatgctgccattcttaggaatatttacaccctgagccacgacatctggactaggcagtascactcagcgacagaaaagccagctccactcactgagctcagctcatggcaccaaaaattgagagtcagaagctatgtaggacacagccccagagagactg

SEQ ID NO: 55045 - DNA, 201 bp, Homo sapiens
tcctgcacgcttgctggggagaaatggagggtggcacatcatcactagagggtggaacatttggaaagattaacagactgacagaagcatacctctgacamcactcaaggacaacttaatgaatatacagcagaaattcagagtctttaattcaaacaaaagaggaaatagatgctgccattcttaggaatatttacaccc

SEQ ID NO: 55046 - DNA, 201 bp, Homo sapiens
gaaagcctgtgtccaaactactatgttgctgtgatttaaattccctctccaggagcccatgtgtccatctttctggttatttaattaaactctcctcctcytccaggaagccttccttgcttagcctctctattccagtcccttactagcattgctgccttaggctgcccttccctgatttacatgagtgtgtatctgtct

SEQ ID NO: 55047 - DNA, 201 bp, Homo sapiens
ggctcgtgtctgtagtcccagctactcgggagactgaggcaggagagtggcgttaacccaggaggtggagcttgcagtgagccgagatcgcaccgctgcastccagcctggacgacagagtgagaccccatctcaaaaataaataaataaataaataaaaataacagccaccatctaataagtgctagccaagtacaaaac

SEQ ID NO: 55048 - DNA, 201 bp, Homo sapiens
aatggtcttggtacccgtgtcaaaatggccataactgtaaataattgaaattaacaatcacctctggtcctgccttcatgatttctcctcttgggcttcargggactctgagtccaaaagcaagagcacagtcactcctgtgcacctctcagcatcttcataatcccagatggcagagaatctctccatttctcaggtgga

SEQ ID NO: 55049 - DNA, 201 bp, Homo sapiens
gttgtgcaaccataacctcaatctagttctaaaacattgtcattaccccgaaagaaagccctgtgcctactagcagtcacccccatttccccttccccaaytcctgcaaccaccaatttgctttccatctgtatgaatttacctattctagacctttcatataaatgaaattatataatgtgtggctttttttgtttggct

SEQ ID NO: 55050 - DNA, 201 bp, Homo sapiens
gcatcagcaagagctatgagagccacttgagggcactgagttgctcttcataaccaaagtctgagactcaggtggttagttaagcaagcacttaattagcygagagagagccagtggttgccctcagctgggtgtagcggccaagtgtcagagacatggtcagctcttggctatcagaagtccagctcccccaggcttgcc

SEQ ID NO: 55051 - DNA, 201 bp, Homo sapiens
aagcagcctctctgtgccaagcgtttaccacatacagggatagaggaagacaccagcctgcctttgaggacttctcagtccagcagataggtctgccattrcagagccttgtaggtttcattaaatcccaggtggagagaagattccagtagcaattgggttttgtgctcacttcaactaatgaaccaagatacagtgagt

SEQ ID NO: 55052 - DNA, 201 bp, Homo sapiens
tctaacagggagctgattgtccctttttcatatattttcaatatattctttttcaataatagccatgacgggagggagcaatgcagtgactcccagctggygaccaagtgagggaatcaaattcattcattcattcattcaacagctctgagaccatgaaagcaggagaagtcatgacagtttagacctgaaagaacatcc

SEQ ID NO: 55053 - DNA, 201 bp, Homo sapiens
tgaactcctggagggcaagaatcacttcttctctttcacggactcctcaaaacctagctcattgttcagcacccagtagggccttggtgaatgtcaggggsaccaggttgaaagctttctccctcccaattcttggtccacaccaccttccagccaggggccagaaaccacttgttaaaggagcagatctcacaagagagg

SEQ ID NO: 55054 - DNA, 201 bp, Homo sapiens
cccaattcttggtccacaccaccttccagccaggggccagaaaccacttgttaaaggagcagatctcacaagagaggtcagccaagtccttaccccttcayaaaggcacttgaagaatttaatctcatctgtcaaggagtccaccttggcctggagctcaaccttattcatgtaagcagcatccacgtcctgggagcacat

SEQ ID NO: 55055 - DNA, 201 bp, Homo sapiens
gctcatgcctgtaatctcagcactttgggaggccaaggcaggaggatcacttgagatcaggagttcaagaccagcctggccaacatggtgaaaccccatcyctactaaaaatacaaaaaaagaaatagccgggtatggtggctcgtgtctgtagtcccagctactcgggagactgaggcaggagagtggcgttaacccagg

SEQ ID NO: 55056 - DNA, 201 bp, Homo sapiens
gcagagagctcagtagaattggggaattggcctgtcctcccctctctcctttctctcctctggaccagcacgttcccacgcagtgtcatctgatgttgtargaaagggagggagtggggttccctcaggccccaggctcaaagaatctgccaactcagaccctccttgatattggaaaatttgccattaaaaataaaaatt

SEQ ID NO: 55057 - DNA, 201 bp, Homo sapiens
atggacaggcatggaggaatgaggaaaactgccctgggtggcagaaggcaggtcatttgtgaggaaaagacccaccaggctggagcaatcatgaataaagkacgactttgcgggggggggactctggatgccaggctgtgcacatgatggggagccattgagggctactgagccagggagggcctgagcaatccatgtttg

SEQ ID NO: 55058 - DNA, 201 bp, Homo sapiens
gaatgaggaaaactgccctgggtggcagaaggcaggtcatttgtgaggaaaagacccaccaggctggagcaatcatgaataaaggacgactttgcgggggrgggactctggatgccaggctgtgcacatgatggggagccattgagggctactgagccagggagggcctgagcaatccatgtttgaggcagcagaatccag

SEQ ID NO: 55059 - DNA, 201 bp, Homo sapiens
caaatacaggcatgctggctatagtctgtgcccttagcctccacaccaccctggctttcttgagtacaaatgtctagtgcccctgcgtgtcctattcccakgtgagcatgcccacctctaaccctcaccagctctggtctctgctctctcctgtccctccaacacttgaaccacagtgtgaaaagctgagctcatcacttt

SEQ ID NO: 55060 - DNA, 201 bp, Homo sapiens
gagcatgcccacctctaaccctcaccagctctggtctctgctctctcctgtccctccaacacttgaaccacagtgtgaaaagctgagctcatcactttctstccctaatataccctcccaccccatcagtgcccacgccctcactcacccaggtgctccgcactctcaagaagtcacctgccatctcttaaggcagttgct

SEQ ID NO: 55061 - DNA, 201 bp, Homo sapiens
ctggttgtccatggctgacatctctgattggttagtgcctgcttgtaccagctgttaaatgttttgcatcttccatagacatcagctttgtgagcctgcarcctcatgtctatgcatgcgtacatgggtttctgatgacattgcacctgataattgctcccatcttctattagctgttgctttcagacccctgagtctcca

SEQ ID NO: 55062 - DNA, 201 bp, Homo sapiens
gcatcttttcctgtgcttcttggccattgtgtatcttctaaagaaagtttattaaaattacttgctcattttttaactgagttgtttgttttttttattgktgagttgcaagagtactttatatattctggatactagacccttatcagctctatgattttccaatattttctttcatttggcaggttgtcttttcacttt

SEQ ID NO: 55063 - DNA, 201 bp, Homo sapiens
cgtctccaggctggcacgctgaagggcaaagaacagagagaccatcagaacagaaaattacatttagctcataccagttaagtagaacaatgccctcattytgcagatggggccctaggtgacaaggagtaaaagctgcaaagccaacaccagaactttgtctcttctattttctattgcagaggagtattcaaagctgtt

SEQ ID NO: 55064 - DNA, 201 bp, Homo sapiens
atcccagcactttgggaggccaaggagggcagattgcctgaggtcaggagtttgagtccagcctggctaacatggtgaaaccccgcctctactaaaaatayaaaaatcagccgagcgcagtggtgcatgcctgtagtcgcagctactcaaaagactgaagtagaagaatcacttgaacctgggaggcagaggttgcagtga

SEQ ID NO: 55065 - DNA, 201 bp, Homo sapiens
cctgagtctccattattctccattagtggtttctaacagggagctgattgtccctttttcatatattttcaatatattctttttcaataatagccatgacrggagggagcaatgcagtgactcccagctggtgaccaagtgagggaatcaaattcattcattcattcattcaacagctctgagaccatgaaagcaggagaa

SEQ ID NO: 55066 - DNA, 201 bp, Homo sapiens
cagggtcaggctgcagctttctcctgctgctcaggttctgggcgcatccctccaccccaaaatgaccaaaggctccagggcttaatgcatgaactgtgagmactgcatgtcttaccagctgacagacatgttccaaggcatatcagaagatgtgtgtgcacatctgtatgtgaatggctgggagcagaacaggtgtccagc

SEQ ID NO: 55067 - DNA, 201 bp, Homo sapiens
gcattagctgcctggtccctcttgcttggtgccctgcaaataaacgccttcctttccactgctgcaaacctcggtgtagatatctggtcttcctgggccgrgcaagtggactccagtttggttctagaacccttgcctccctcccacccttcctttcttcctttggtggacttctactgagtgcctgctgtatgctggcac

SEQ ID NO: 55068 - DNA, 201 bp, Homo sapiens
ggagttcaagaccagcctggccaacatggtgaaaccccatctctactaaaaatacaaaaaaagaaatagccgggtatggtggctcgtgtctgtagtcccarctactcgggagactgaggcaggagagtggcgttaacccaggaggtggagcttgcagtgagccgagatcgcaccgctgcactccagcctggacgacagagt

SEQ ID NO: 55069 - DNA, 201 bp, Homo sapiens
gggaaattctgggcaccttgctagcctggagaaataaataagcaacctgacaagcaagaagataacagtagcccaaaacaacagccacgaaagctggaatygtgggatgtttggttccgccatagaaactaaagatagcaccttaacatatgtcccagagttgtttgtcagaaacccaaaccccaccaaaagggatgcctg

SEQ ID NO: 55070 - DNA, 201 bp, Homo sapiens
catcctgctctcctccaggaggtcttcctgcacccacacaggccaggtctgagctctccttacctccctccgctctgaacacatccttagcatgtgctggwggggctgcaactctgtgacagctcccatggggatcctctgaagccatgtcacatgtcatcttagtttttctttgtaaggctagcagagtcttctccagat

SEQ ID NO: 55071 - DNA, 201 bp, Homo sapiens
agccggaccctggaacaaggggatgtagggcatggagtgagggacagacatgtgagcagctgatatgacaccagaaaaatagagtgccggctttaacacakgctcaggacagggctgtgagtgtacaagccactggtccagccccggctgctcaccagtggtgtgaacatggacaggtcactcagccatctgggactcggt

SEQ ID NO: 55072 - DNA, 201 bp, Homo sapiens
tgagaccccatctcaaaaataaataaataaataaataaaaataacagccaccatctaataagtgctagccaagtacaaaactcagtaggaggcactttacraacattatctcagattttttggtattgatcttttatcaaatatttattgggtacctaccaagtgctgaggggggccataaaaagtttcctgccctcaaag

SEQ ID NO: 55073 - DNA, 201 bp, Homo sapiens
tccttaccccttcataaaggcacttgaagaatttaatctcatctgtcaaggagtccaccttggcctggagctcaaccttattcatgtaagcagcatccacrtcctgggagcacatgatagtcaagccgccctgagagggcctcccctgcccatccctccctccctgccacaggaagccttgctctttcctctcccttcacc

SEQ ID NO: 55074 - DNA, 201 bp, Homo sapiens
ctcatctgtcaaggagtccaccttggcctggagctcaaccttattcatgtaagcagcatccacgtcctgggagcacatgatagtcaagccgccctgagagrgcctcccctgcccatccctccctccctgccacaggaagccttgctctttcctctcccttcaccctgtgcttcatggggggctccctgagagtccccttca

SEQ ID NO: 55075 - DNA, 201 bp, Homo sapiens
gccattgtgtatcttctaaagaaagtttattaaaattacttgctcattttttaactgagttgtttgttttttttattgttgagttgcaagagtactttatrtattctggatactagacccttatcagctctatgattttccaatattttctttcatttggcaggttgtcttttcactttcttgataatgtcccttactgta

SEQ ID NO: 55076 - DNA, 201 bp, Homo sapiens
tgttttttttattgttgagttgcaagagtactttatatattctggatactagacccttatcagctctatgattttccaatattttctttcatttggcaggktgtcttttcactttcttgataatgtcccttactgtaaagaagttttttaactttgaggaagtccaatttatctagtttctcttgtgttgcttatgctttt

SEQ ID NO: 55077 - DNA, 201 bp, Homo sapiens
caggggactctgagtccaaaagcaagagcacagtcactcctgtgcacctctcagcatcttcataatcccagatggcagagaatctctccatttctcaggtrgataagctgcagccagagaggctgctccttctgcccacctcagcactctagtagaggacacactgtatcacatctgcttagcccttcatccctgcatcca

SEQ ID NO: 55078 - DNA, 201 bp, Homo sapiens
tccctgatttacatgagtgtgtatctgtctcttccagcagcctgagattgcctccagagcagcctcatctgagttggcctgcagcttcccagcaagagtcytgcacgcttgctggggagaaatggagggtggcacatcatcactagagggtggaacatttggaaagattaacagactgacagaagcatacctctgacacca

SEQ ID NO: 55079 - DNA, 201 bp, Homo sapiens
gtggctcacacctgtaatcccagcactttgggtggccgaggtgggcagatcacttgaggccaggaattccagaccagcctggccaacatggtgaaaccccrtctctaataaaaatacaaaaattagctgggagtggtggcactgcctgtaatcccagctacttgggaggctgaggcaggagaatcgtgtgaacccaggagg

SEQ ID NO: 55080 - DNA, 201 bp, Homo sapiens
gtgtcgagattccactaaacatcaatgggctcctgcttttatacgtgcatcatttaaactcatccttataacaacttacgaaactgacactatcgccttcwtcttacagatgagaaaacaagagtcctggagatactagatgatttaccgagaccacaccactagcataggataaagccaataattagcccctgctgaaga

SEQ ID NO: 55081 - DNA, 201 bp, Homo sapiens
cagtgatagaggaggaaggagagttggggacctcccacaggaagggagggcctaggtggggctcctgaggtgcctgtgtttttcgggagggaaaaaaggasagactgaaggaaaccaggacagggccacagctcactagggggactaaacccccaatccccccagtcccgctttaactgagatctgggaagatttaggggt

SEQ ID NO: 55082 - DNA, 201 bp, Homo sapiens
ttggttctctccctgctcgggctcctaaggtttttatgatggaacaggcccctagccacttactgtagatcaaacactctttagttctctttctctcctctttttttttttttttttaaagaaaagctctttgaactctttacgactctacccaccacctacctagtcatcacagggaacttttctcagctccagtgcaca

SEQ ID NO: 55083 - DNA, 201 bp, Homo sapiens
cttttatacgtgcatcatttaaactcatccttataacaacttacgaaactgacactatcgccttcatcttacagatgagaaaacaagagtcctggagataytagatgatttaccgagaccacaccactagcataggataaagccaataattagcccctgctgaagagccagtcattagccccaggtctgtctgagcccccg

SEQ ID NO: 55084 - DNA, 201 bp, Homo sapiens
cacaggaaggatcctccagcctccaatatcatctccccactgacgcagtgtttaaaatttgctgctgtcaggtaagacaggccccccacccccaccccccsgcccactaacatggaagtagtaccatggcacagggcaagggaacccaggagggcttcatcgacagctgtgtccctcagtcaacagaccatgccccactcc

SEQ ID NO: 55085 - DNA, 201 bp, Homo sapiens
cctccaaggaccagcatcctgcacttccatggtctcctggtgcagggttttgtacctttctaccaaaacatctttcattttgttgatcctaaatctctccytttggtatctccctggaagagtcgggaaggaggcagggtgagggtggggggacaggagtgtccttactgcatcatacagacacttgaggaacttgatgtc

SEQ ID NO: 55086 - DNA, 201 bp, Homo sapiens
cttccatggtctcctggtgcagggttttgtacctttctaccaaaacatctttcattttgttgatcctaaatctctccttttggtatctccctggaagagtygggaaggaggcagggtgagggtggggggacaggagtgtccttactgcatcatacagacacttgaggaacttgatgtctttgtccagtgagtccactttgg

SEQ ID NO: 55087 - DNA, 201 bp, Homo sapiens
gattttctattttctacccacaaaggaaagctcactcaatatcaatttcttctcaggctgcctgaagctttgggaatagggaaaggaggatggggcagctstgttatgcctggagaaaacaaagcccagagaggtagtaggtttcctcaggtcacacagcaaggttgagctggacccgagtttcacagttcccagaccaga

SEQ ID NO: 55088 - DNA, 201 bp, Homo sapiens
tccacctcatatctgccagcagggagagtagatggccttagcccccttagccaaggaactttctcttcctgctggccaggcaaatgtttgggatacagggkccctgcagggtctctggggtgagcagtaagaggctagtgacaggagtaagatatccctgagttgcttcacttgtctcctagtttttgcatgttaggaaaa

SEQ ID NO: 55089 - DNA, 201 bp, Homo sapiens
gccctgcaaataaacgccttcctttccactgctgcaaacctcggtgtagatatctggtcttcctgggccgggcaagtggactccagtttggttctagaacycttgcctccctcccacccttcctttcttcctttggtggacttctactgagtgcctgctgtatgctggcaccatgctcagtgctggggacacaggagttgg

SEQ ID NO: 55090 - DNA, 201 bp, Homo sapiens
tggagaaaagcagtctccaaggggtagagaacacactgatggggcacccagagtgctgcctccttttatccctgttgagcccaggacaccggaaaagggcrtctctccactatctcctttcccctgctgatgggccaggggccatgggcaatttgtagaacagagatctccaagccctttgcagcaacaaagctcttctga

SEQ ID NO: 55091 - DNA, 201 bp, Homo sapiens
gataagattatttgtcctactctaggaagtcaggcaggagctgggatattagcccctgcactccctggggaaacaccctatggctgaagtcaccaaggaamaggaccccctgagtttcactcccaggttcagggtgggctgttctgccagtttcctggcaacttcagggagcactcaattttcaaacaggaagtatcactg

SEQ ID NO: 55092 - DNA, 201 bp, Homo sapiens
tcgggctcctaaggtttttatgatggaacaggcccctagccacttactgtagatcaaacactctttagttctctttctctcctcttttttttttttttttwaaagaaaagctctttgaactctttacgactctacccaccacctacctagtcatcacagggaacttttctcagctccagtgcacataggtatgtgaagaca

SEQ ID NO: 55093 - DNA, 201 bp, Homo sapiens
ccacacaggtgcgcaggctgtccatcacgggtaatggacatctgaggttgagaaaatgatatgtgcaaaggccctcaggtgtgaaaagtctggcctgcatrgggaaaggctggagaataaggtgggaaacgacacgggggagacaggatctcgggcactctgaatgccatcctcaaacgaggtttgcacttgaaagatggt

SEQ ID NO: 55094 - DNA, 201 bp, Homo sapiens
ctcactttcaaactgtatgttatacctatttcttatacatatttctgttccaggtgaagcagaaacagaagcaaggtctaagacacagaaatgtggttagsactgggatgttcttaatacagacatattgttgattggggaggtaagagtactaaccattttatttaaagagcttacctcttccatcccttattattctca

SEQ ID NO: 55095 - DNA, 201 bp, Homo sapiens
gttaattgagcactatttcatatacaccttagatagagaggctacaagcatatatacacacaggccttacatattagggtgaaaaggaagttggttaaaaraagaggaagacagggccattgtgtgggagcaggactggggagtgagtggtgggtggtggagagtgagacagtggggagaatgaagggaagaccactcgct

SEQ ID NO: 55096 - DNA, 201 bp, Homo sapiens
ttaatctcccttacccctggggtggcatttccgcaaggcccaacttcaagacaaaggaggtcttgactgagcccaaatacacacacacacacaaacacacrcacacacacgtacacatgcacacatactgagagggtgctagctgtggccagtgggactcagcacacctggcaccagctcaccttggtctggtacagggtc

SEQ ID NO: 55097 - DNA, 201 bp, Homo sapiens
agaaagagggcggcctgggcacatggcccctgccctctccctcctggcctgaaatatcagctgtaagattcttatgtcaactctgaaaaaaagtctctgarcagctagatttcattcagctctgcagtgtacaggttgttttaggagatcccataaatcatggggaaaacatgagggctaataaagttcctattaataaat

SEQ ID NO: 55098 - DNA, 201 bp, Homo sapiens
ccgagttgagaggacttgaaattttagcatcctttgaaacaaatgtcacatgaatgctgaggacaccaaatgccaaggaactctgcatgtgacatggtggscttctttgatggaggaggccagaagggcaggaagcaccttagctgagggccctcaaaaggagccgcaatggggactcagcattgcgagggatccccattt

SEQ ID NO: 55099 - DNA, 201 bp, Homo sapiens
ggactgtagaagttttaatcattcatggagtggccacacacactgtcacctgaactcatcaaactgtcttctgttcttttttactgaccaagatcccacasagtgaacctggggcagagggacaccaaaagcttgggtcttgtgaacatggcccgagttgagaggacttgaaattttagcatcctttgaaacaaatgtcac

SEQ ID NO: 55100 - DNA, 201 bp, Homo sapiens
ttcccccatgggcaggaccaaatgaagagaggcacttcccagggcccatctggtgctgctggtctgctgatgaggaaaggggccactgagggccctgtctstcagcaccacagcatctccacacaggctctccagcttttacagctgaggacatgctctcattcactcattcaactattccatctcattcattcattccat

SEQ ID NO: 55101 - DNA, 201 bp, Homo sapiens
ctcagcccccgtcagctctagccccacgtcagagccccttcttgggcatctcgggccacctcctttactctcgcccgcagtggcttcctgctgagatggaytctctctgttgtgtgtttcagtctactaagagatttttatcagcactgatcatacagcttcagttttcatgcacttagcctcacacattttaccttttcc

SEQ ID NO: 55102 - DNA, 201 bp, Homo sapiens
tttttctgcacttatatagctcttgattaaacaaaaacaacttaagttatttaatgctggtctttcttcttcccactaccatgagcacagaggagtagtgygtgtgtgtgtgtctgtgtgtgtgtgtgtacatgtgtaagcatgcaccatgcgtggtgagagatggggtgcaggggagggtaaggagatgggacaacttga

SEQ ID NO: 55103 - DNA, 201 bp, Homo sapiens
tcattgatggacatttgagctgtttccacctttggctatggtgaatagtgctgctgtgaatatgcatgtacatgtgtttgtttgagaaacctggttttaatttttttttttttttaatgagacagggtcttgttctgccacccaggctgaagtgcagtggcacaatcactgctcactgcagccttgaactcccgggcccaa

SEQ ID NO: 55104 - DNA, 201 bp, Homo sapiens
gacgattaagaagaatgagcttacctccccattggagccccaggctttgctggagcgaccttgaacttggacagcccttagaggccatcttgctcctcccsccacccacaaaaatgcaccatgaacggtcggggatgctgtttctcaaacattgccggcattaatacctcctctcccacagcctttgggattttttacaac

SEQ ID NO: 55105 - DNA, 201 bp, Homo sapiens
actgtttgccttggagcttcctaccaaagcagagagaaaactggtcccgacacaagggtatccggcccctcacctgcactcctcgctctccagcagcttgmggtaggtggcgatctccatatccagggccagcttcaggctcacgagctcctggtactcacgcagcatccgtgccagctcctccttggcctggtgcagggc

SEQ ID NO: 55106 - DNA, 201 bp, Homo sapiens
gcaggtggatcacctgaggtcaggagttcaagaccagcctggccaacatgatgaaacctcgtctctactaaaaacacaaaaattagccgggagtgatggcrcgcagctgcctgtggtcccagctactcgagaggctgaggcaggagagtcacttgaacccaggagacagaggttgcagtgagcccagattgtgccacagaa

SEQ ID NO: 55107 - DNA, 201 bp, Homo sapiens
aatgctggtctttcttcttcccactaccatgagcacagaggagtagtgtgtgtgtgtgtgtctgtgtgtgtgtgtgtacatgtgtaagcatgcaccatgcrtggtgagagatggggtgcaggggagggtaaggagatgggacaacttgacttgcctgggagctgagagccttaaacccttgcactgctttcacaaacttga

SEQ ID NO: 55108 - DNA, 201 bp, Homo sapiens
acatagttaaaggaatcaatttccagctcctttgtgcctgtgcattctgtcttaaaactacctgcctcagagagcacctgtggttgagatgtcatgcagaytctactgtccctctccctgtcacaattagcccctcccacattatagcagaggtgaaaagacactcccttctggcacatggcatcttaatactgtgcaatg

SEQ ID NO: 55109 - DNA, 201 bp, Homo sapiens
atgcattacaggacatttgtgagagtatggtaacgaaatagagcattggtaagaaataattaatgctaaatggataagcaaaatgtggtgtatacatacartgggatatcattcagacttagaaagaaaaaaaaattctacaatatgctacgacatggatgaaccttgaggaccttttgctaagtgaaagaagccaatcac

SEQ ID NO: 55110 - DNA, 201 bp, Homo sapiens
gcaaaacaagccaagactgtagttaatctcccttacccctggggtggcatttccgcaaggcccaacttcaagacaaaggaggtcttgactgagcccaaatmcacacacacacacaaacacacgcacacacacgtacacatgcacacatactgagagggtgctagctgtggccagtgggactcagcacacctggcaccagct

SEQ ID NO: 55111 - DNA, 201 bp, Homo sapiens
ctccccgaggttttggcaaggggatccttgagctcactgccacagctgcctttggtcttgacgtctgcagctgcagttttgtagctataactgcttgaggygccaaagcccatgctgaagccagcccctcctgccccagcattggtgctgctgatgacggctggaatggatgagagaagacctcagcccccgtcagctcta

SEQ ID NO: 55112 - DNA, 201 bp, Homo sapiens
ggggagaatgaagggaagaccactcgctacacagacagtgagtgtgctcaaccatgggtgctttgagaaccagagcaggaagccatgaggaagctctaacrtctgtatctatcatggggtaatgatgtcttgcagggctattgtgcagaataggtggcacagggcacgtgaagcaatgggcctgcccggccctggcctcag

SEQ ID NO: 55113 - DNA, 201 bp, Homo sapiens
tgtgtgggagcaggactggggagtgagtggtgggtggtggagagtgagacagtggggagaatgaagggaagaccactcgctacacagacagtgagtgtgcwcaaccatgggtgctttgagaaccagagcaggaagccatgaggaagctctaacatctgtatctatcatggggtaatgatgtcttgcagggctattgtgcag

SEQ ID NO: 55114 - DNA, 201 bp, Homo sapiens
gggcatggagtgagggacagacatgtgagcagctgatatgacaccagaaaaatagagtgccggctttaacacaggctcaggacagggctgtgagtgtacargccactggtccagccccggctgctcaccagtggtgtgaacatggacaggtcactcagccatctgggactcggtttgcctgcctgtagaatgggggtgtgg

SEQ ID NO: 55115 - DNA, 201 bp, Homo sapiens
taaggcatgcattcccatggtaaaagtgctgactgcaagccggaccctggaacaaggggatgtagggcatggagtgagggacagacatgtgagcagctgayatgacaccagaaaaatagagtgccggctttaacacaggctcaggacagggctgtgagtgtacaagccactggtccagccccggctgctcaccagtggtgt

SEQ ID NO: 55116 - DNA, 201 bp, Homo sapiens
caattgagacatgggtatgttgtgtgtatatccagctctttttcccagggaaggtgggctaaactaaggcatgcattcccatggtaaaagtgctgactgcragccggaccctggaacaaggggatgtagggcatggagtgagggacagacatgtgagcagctgatatgacaccagaaaaatagagtgccggctttaacaca

SEQ ID NO: 55117 - DNA, 201 bp, Homo sapiens
acaaaatagaggcaccgagggtttttcccctgcttggaaatgaacagccagtgaacagataggaatgtattttagtgaatggacccagtgccctccacctytcacttagcccatctcggccaggtctctgggcaaagtcctgctgttggtccacacctctcagacatgaaccagcccacagccagcaaacacagacgtatg

SEQ ID NO: 55118 - DNA, 201 bp, Homo sapiens
agctggcaaagggcggctcaaaccccagagcagctgccaaatgggacctaagcagtctttaacaagctccctgtctccaacaattcacatccctgttaccrcctcctccaggaagcctttccagattgtgttcctctctcaggcctttcttcctatggagccccctggctgtgccttgccagtgcctccatgcctggctca

SEQ ID NO: 55119 - DNA, 201 bp, Homo sapiens
tcctggaagctttgctaaatgtgaatgtaagaactgaggggcagtgcagaacaattgtcctttgtgtagttgccactctataggtggcagaagtggcagarcccctgagatggagattggaaacagctggcaaagggcggctcaaaccccagagcagctgccaaatgggacctaagcagtctttaacaagctccctgtctc

SEQ ID NO: 55120 - DNA, 201 bp, Homo sapiens
caagagttggggagaatgactcacatcatggggaaacccgtctggaagtgagaaccggtgaaagcaggtcctgggtcctggtggctcctatttcagggaaraggaacaggggcagcgtggagcaagggtgggggctgcatgttttaacagggggccaaggagaaggctcagaggaaccagcagcccttccaggaagagaga

SEQ ID NO: 55121 - DNA, 201 bp, Homo sapiens
tccacctcccctccagccacttcaggaagaaatttatattgtctgacaccccaaccccctttattacaggattcatttttgaaagacaacagggaggctgrgggaaatgccttaatcttttgatcttcactgtgaagtttgatgcttgatccacctcttcctctgcccatttgcaaagcaaacaagcaggctgtgcattgg

SEQ ID NO: 55122 - DNA, 201 bp, Homo sapiens
aggcaggtcatttgtgaggaaaagacccaccaggctggagcaatcatgaataaaggacgactttgcgggggggggactctggatgccaggctgtgcacatratggggagccattgagggctactgagccagggagggcctgagcaatccatgtttgaggcagcagaatccaggtgctatgtggacagggttggtgggggtg

SEQ ID NO: 55123 - DNA, 201 bp, Homo sapiens
gcctgggtggtggtgaccttgacattgccttacaaccatgagaacctttccagtcagctgcatttcctccagttggattttctctcctggataagattatytgtcctactctaggaagtcaggcaggagctgggatattagcccctgcactccctggggaaacaccctatggctgaagtcaccaaggaacaggaccccctg

SEQ ID NO: 55124 - DNA, 201 bp, Homo sapiens
tcattacaaagggtgcccctgtgggctgggccctgtgctggaggctggccagtaagggttgctgacagcggtggtaatgatggtggcagagtggctgtgayggagaaggaaaaggtagaggcagagtagaatttcctgacaacagtgttgtgattgtggccacacagaagcaatcctcctaattggttcctagggagctta

SEQ ID NO: 55125 - DNA, 201 bp, Homo sapiens
agaccccctccacctcccctccagccacttcaggaagaaatttatattgtctgacaccccaaccccctttattacaggattcatttttgaaagacaacagrgaggctgggggaaatgccttaatcttttgatcttcactgtgaagtttgatgcttgatccacctcttcctctgcccatttgcaaagcaaacaagcaggctg

SEQ ID NO: 55126 - DNA, 201 bp, Homo sapiens
ttcctctgcccatttgcaaagcaaacaagcaggctgtgcattgggctgtaattaagccacatcatcactaatgacatgctctctatctcccatcatcagarcatcatacaatccatccaaacaggaaggagaagcccagccctgcaccgtccctggggagtgctggagtggtgggtcaggcctggggtggcaactgcctcc

SEQ ID NO: 55127 - DNA, 201 bp, Homo sapiens
agggagtcactagcaccagtcccttccccaggcctctgcgcccttcttcattcctcatgctttagcacaggacaggctcctggaccttctatttttctgcycccctcagcacccactgaaatcgtcctctttctcctctctctccaagaaccttcactgatggcccaggcagaacccaccattccttcctctgctctctga

SEQ ID NO: 55128 - DNA, 201 bp, Homo sapiens
atggtaacgaaatagagcattggtaagaaataattaatgctaaatggataagcaaaatgtggtgtatacatacaatgggatatcattcagacttagaaagaaaaaaaaattctacaatatgctacgacatggatgaaccttgaggaccttttgctaagtgaaagaagccaatcacaaaaaagacaaatattccaaaagaca

SEQ ID NO: 55129 - DNA, 17 bp, Homo sapiens
ctgcagcctctcctacg

SEQ ID NO: 55130 - DNA, 18 bp, Homo sapiens
cctgcagcctctcctaca

SEQ ID NO: 55131 - DNA, 19 bp, Homo sapiens
gattccccatcggtcataa

SEQ ID NO: 55132 - DNA, 19 bp, Homo sapiens
cacccccagtacatgaatc

SEQ ID NO: 55133 - DNA, 19 bp, Homo sapiens
cacccccagtacatgaatg

SEQ ID NO: 55134 - DNA, 21 bp, Homo sapiens
caatgtcctctggaaactcac

SEQ ID NO: 55135 - DNA, 18 bp, Homo sapiens
cgtgttcttccacattcc

SEQ ID NO: 55136 - DNA, 19 bp, Homo sapiens
ccgtgttcttccacattct

SEQ ID NO: 55137 - DNA, 23 bp, Homo sapiens
ctgtgaaggcaagaacacttata

SEQ ID NO: 55138 - DNA, 15 bp, Homo sapiens
tggctcacggggtga

SEQ ID NO: 55139 - DNA, 14 bp, Homo sapiens
ggctcacggggtgg

SEQ ID NO: 55140 - DNA, 23 bp, Homo sapiens
ccaggcctacaatttcattatta

SEQ ID NO: 55141 - DNA, 18 bp, Homo sapiens
ccatgctttcacggtctc

SEQ ID NO: 55142 - DNA, 18 bp, Homo sapiens
ccatgctttcacggtctt

SEQ ID NO: 55143 - DNA, 25 bp, Homo sapiens
cccttttaaaaagttagcttctgtt

SEQ ID NO: 55144 - DNA, 14 bp, Homo sapiens
gacgtgcagcagat

SEQ ID NO: 55145 - DNA, 14 bp, Homo sapiens
gacgtgcagcagac

SEQ ID NO: 55146 - DNA, 19 bp, Homo sapiens
tgggtgacgctgtttatca

SEQ ID NO: 55147 - DNA, 15 bp, Homo sapiens
atcgcccatgtgctg

SEQ ID NO: 55148 - DNA, 16 bp, Homo sapiens
catcgcccatgtgctt

SEQ ID NO: 55149 - DNA, 20 bp, Homo sapiens
tcaaaccaggaaccctatct

SEQ ID NO: 55150 - DNA, 17 bp, Homo sapiens
ctgtgttgcagctccag

SEQ ID NO: 55151 - DNA, 17 bp, Homo sapiens
ctgtgttgcagctccaa

SEQ ID NO: 55152 - DNA, 23 bp, Homo sapiens
tcaagccctcatcagtttataac

SEQ ID NO: 55153 - DNA, 19 bp, Homo sapiens
ctgccctctttttagcaga

SEQ ID NO: 55154 - DNA, 19 bp, Homo sapiens
ctgccctctttttagcagt

SEQ ID NO: 55155 - DNA, 22 bp, Homo sapiens
ccctttctcattcattcatttt

SEQ ID NO: 55156 - DNA, 18 bp, Homo sapiens
ccttctgctgctgcttta

SEQ ID NO: 55157 - DNA, 17 bp, Homo sapiens
cttctgctgctgctttg

SEQ ID NO: 55158 - DNA, 20 bp, Homo sapiens
acacacccaggtcattaaca

SEQ ID NO: 55159 - DNA, 19 bp, Homo sapiens
ctggaacagaaggacaagg

SEQ ID NO: 55160 - DNA, 20 bp, Homo sapiens
cctggaacagaaggacaaga

SEQ ID NO: 55161 - DNA, 26 bp, Homo sapiens
caacacttctgactttttgatctaag

SEQ ID NO: 55162 - DNA, 20 bp, Homo sapiens
cttggtaactttcccttcag

SEQ ID NO: 55163 - DNA, 20 bp, Homo sapiens
cttggtaactttcccttcaa

SEQ ID NO: 55164 - DNA, 23 bp, Homo sapiens
ccaaggttgaagcaataaataga

SEQ ID NO: 55165 - DNA, 16 bp, Homo sapiens
tggcatcaggtccatg

SEQ ID NO: 55166 - DNA, 18 bp, Homo sapiens
cttggcatcaggtccata

SEQ ID NO: 55167 - DNA, 20 bp, Homo sapiens
tctggacagctgcctctact

SEQ ID NO: 55168 - DNA, 18 bp, Homo sapiens
gatgctcaagggcttatg

SEQ ID NO: 55169 - DNA, 18 bp, Homo sapiens
gatgctcaagggcttatc

SEQ ID NO: 55170 - DNA, 23 bp, Homo sapiens
tgatgaccctgaatacagacata

SEQ ID NO: 55171 - DNA, 22 bp, Homo sapiens
tgatgctaatctgttctctgtg

SEQ ID NO: 55172 - DNA, 24 bp, Homo sapiens
tctgatgctaatctgttctctgta

SEQ ID NO: 55173 - DNA, 23 bp, Homo sapiens
ataacaagaggaaggagatcaga

SEQ ID NO: 55174 - DNA, 19 bp, Homo sapiens
cagccagctcacaaagaac

SEQ ID NO: 55175 - DNA, 19 bp, Homo sapiens
cagccagctcacaaagaaa

SEQ ID NO: 55176 - DNA, 19 bp, Homo sapiens
gctcttggtccgttgtctt

SEQ ID NO: 55177 - DNA, 20 bp, Homo sapiens
ctctttctctttggatgcct

SEQ ID NO: 55178 - DNA, 19 bp, Homo sapiens
tctttctctttggatgcca

SEQ ID NO: 55179 - DNA, 19 bp, Homo sapiens
tgaggccagggtagacaag

SEQ ID NO: 55180 - DNA, 15 bp, Homo sapiens
gttgttttggcggca

SEQ ID NO: 55181 - DNA, 13 bp, Homo sapiens
tgttttggcggcg

SEQ ID NO: 55182 - DNA, 20 bp, Homo sapiens
gggtttgaggcagattctac

SEQ ID NO: 55183 - DNA, 24 bp, Homo sapiens
tagtgcaatattgctgaaaatact

SEQ ID NO: 55184 - DNA, 21 bp, Homo sapiens
tgcaatattgctgaaaatacc

SEQ ID NO: 55185 - DNA, 23 bp, Homo sapiens
ttggttgaactcctgaaacttat

SEQ ID NO: 55186 - DNA, 16 bp, Homo sapiens
gctgggccaagatggt

SEQ ID NO: 55187 - DNA, 15 bp, Homo sapiens
ctgggccaagatggc

SEQ ID NO: 55188 - DNA, 20 bp, Homo sapiens
ccctgccttcctcttatctc

SEQ ID NO: 55189 - DNA, 22 bp, Homo sapiens
cacacatatggtggttcataac

SEQ ID NO: 55190 - DNA, 23 bp, Homo sapiens
acacacatatggtggttcataat

SEQ ID NO: 55191 - DNA, 19 bp, Homo sapiens
catgtcccagctcttcttg

SEQ ID NO: 55192 - DNA, 20 bp, Homo sapiens
cttgaaggtgctgtgtgttt

SEQ ID NO: 55193 - DNA, 20 bp, Homo sapiens
cttgaaggtgctgtgtgttc

SEQ ID NO: 55194 - DNA, 23 bp, Homo sapiens
tctctaccccagctcatatactc

SEQ ID NO: 55195 - DNA, 20 bp, Homo sapiens
gaagacagtgagcacagcac

SEQ ID NO: 55196 - DNA, 20 bp, Homo sapiens
gaagacagtgagcacagcaa

SEQ ID NO: 55197 - DNA, 24 bp, Homo sapiens
gggtcacttgagtttctctctcta

SEQ ID NO: 55198 - DNA, 14 bp, Homo sapiens
acgctgctgttccg

SEQ ID NO: 55199 - DNA, 14 bp, Homo sapiens
acgctgctgttcca

SEQ ID NO: 55200 - DNA, 24 bp, Homo sapiens
cagacagacaacaattcagaagaa

SEQ ID NO: 55201 - DNA, 16 bp, Homo sapiens
tggtggtgctgtcaac

SEQ ID NO: 55202 - DNA, 16 bp, Homo sapiens
tggtggtgctgtcaat

SEQ ID NO: 55203 - DNA, 16 bp, Homo sapiens
cccgtggagggtctga

SEQ ID NO: 55204 - DNA, 26 bp, Homo sapiens
cttcctctatcaagtaatctacagtc

SEQ ID NO: 55205 - DNA, 26 bp, Homo sapiens
cttcctctatcaagtaatctacagtt

SEQ ID NO: 55206 - DNA, 23 bp, Homo sapiens
gggtaaatgcagacaacatattc

SEQ ID NO: 55207 - DNA, 20 bp, Homo sapiens
cccacatggtttttacaagg

SEQ ID NO: 55208 - DNA, 20 bp, Homo sapiens
cccacatggtttttacaaga

SEQ ID NO: 55209 - DNA, 18 bp, Homo sapiens
acccccacgtctgactta

SEQ ID NO: 55210 - DNA, 24 bp, Homo sapiens
acgggatatagaaaacacagatga

SEQ ID NO: 55211 - DNA, 24 bp, Homo sapiens
acgggatatagaaaacacagatgt

SEQ ID NO: 55212 - DNA, 24 bp, Homo sapiens
tgaacctggtccttattgttatct

SEQ ID NO: 55213 - DNA, 25 bp, Homo sapiens
ccactgtttatctgtatgagttcac

SEQ ID NO: 55214 - DNA, 25 bp, Homo sapiens
ccactgtttatctgtatgagttcat

SEQ ID NO: 55215 - DNA, 20 bp, Homo sapiens
gcctcaatcgactgaatcaa

SEQ ID NO: 55216 - DNA, 20 bp, Homo sapiens
aagaagttcacagctgaagg

SEQ ID NO: 55217 - DNA, 21 bp, Homo sapiens
caagaagttcacagctgaaga

SEQ ID NO: 55218 - DNA, 20 bp, Homo sapiens
cctgctggagagacagagtg

SEQ ID NO: 55219 - DNA, 20 bp, Homo sapiens
cctcactccctcacagttgt

SEQ ID NO: 55220 - DNA, 19 bp, Homo sapiens
ctcactccctcacagttgc

SEQ ID NO: 55221 - DNA, 22 bp, Homo sapiens
ggctgtagggtttttcatctta

SEQ ID NO: 55222 - DNA, 22 bp, Homo sapiens
cagacttgatgtttttgaaagc

SEQ ID NO: 55223 - DNA, 24 bp, Homo sapiens
cacagacttgatgtttttgaaagt

SEQ ID NO: 55224 - DNA, 19 bp, Homo sapiens
tgcaaaggaagcaacttca

SEQ ID NO: 55225 - DNA, 20 bp, Homo sapiens
atctggtggtcattcaaatg

SEQ ID NO: 55226 - DNA, 21 bp, Homo sapiens
catctggtggtcattcaaata

SEQ ID NO: 55227 - DNA, 25 bp, Homo sapiens
tgattgtgaggttctaaaagagata

SEQ ID NO: 55228 - DNA, 18 bp, Homo sapiens
cccaaaaggcaatgagat

SEQ ID NO: 55229 - DNA, 18 bp, Homo sapiens
cccaaaaggcaatgagac

SEQ ID NO: 55230 - DNA, 23 bp, Homo sapiens
aagctttttcctgttgaagtaga

SEQ ID NO: 55231 - DNA, 18 bp, Homo sapiens
tggacaacagcaccttac

SEQ ID NO: 55232 - DNA, 18 bp, Homo sapiens
tggacaacagcaccttat

SEQ ID NO: 55233 - DNA, 20 bp, Homo sapiens
ttccagaggttccttcaatc

SEQ ID NO: 55234 - DNA, 21 bp, Homo sapiens
tgaagttttgcatgtaaatcg

SEQ ID NO: 55235 - DNA, 22 bp, Homo sapiens
gtgaagttttgcatgtaaatca

SEQ ID NO: 55236 - DNA, 26 bp, Homo sapiens
tttctatggtattgacacttttctct

SEQ ID NO: 55237 - DNA, 19 bp, Homo sapiens
cctcagaatggccaaaaac

SEQ ID NO: 55238 - DNA, 19 bp, Homo sapiens
cctcagaatggccaaaaat

SEQ ID NO: 55239 - DNA, 18 bp, Homo sapiens
ccaggcagccagacttct

SEQ ID NO: 55240 - DNA, 20 bp, Homo sapiens
tggccaagtgatagaaattg

SEQ ID NO: 55241 - DNA, 22 bp, Homo sapiens
tctggccaagtgatagaaatta

SEQ ID NO: 55242 - DNA, 19 bp, Homo sapiens
ccccaacccacaacttact

SEQ ID NO: 55243 - DNA, 17 bp, Homo sapiens
cagctgctgctgtccac

SEQ ID NO: 55244 - DNA, 17 bp, Homo sapiens
cagctgctgctgtccat

SEQ ID NO: 55245 - DNA, 22 bp, Homo sapiens
catgaacctgtcaatcttctca

SEQ ID NO: 55246 - DNA, 19 bp, Homo sapiens
caatgagcatttagcatcg

SEQ ID NO: 55247 - DNA, 21 bp, Homo sapiens
ttcaatgagcatttagcatct

SEQ ID NO: 55248 - DNA, 23 bp, Homo sapiens
tggaggaaaagtggaagatatta

SEQ ID NO: 55249 - DNA, 24 bp, Homo sapiens
ttgagccagataaagaatgtaaat

SEQ ID NO: 55250 - DNA, 23 bp, Homo sapiens
tgagccagataaagaatgtaaaa

SEQ ID NO: 55251 - DNA, 21 bp, Homo sapiens
gggctcagattctttttcttc

SEQ ID NO: 55252 - DNA, 18 bp, Homo sapiens
ggcgttcagtttttagcg

SEQ ID NO: 55253 - DNA, 18 bp, Homo sapiens
ggcgttcagtttttagcc

SEQ ID NO: 55254 - DNA, 20 bp, Homo sapiens
caatacgccagcaaaatacc

SEQ ID NO: 55255 - DNA, 17 bp, Homo sapiens
gagccagaggagtcctg

SEQ ID NO: 55256 - DNA, 18 bp, Homo sapiens
ggagccagaggagtccta

SEQ ID NO: 55257 - DNA, 21 bp, Homo sapiens
cgggtgtctgtcttgagatac

SEQ ID NO: 55258 - DNA, 18 bp, Homo sapiens
gctgtggctgcatttcac

SEQ ID NO: 55259 - DNA, 18 bp, Homo sapiens
gctgtggctgcatttcat

SEQ ID NO: 55260 - DNA, 17 bp, Homo sapiens
ccccaccctcgcttatc

SEQ ID NO: 55261 - DNA, 25 bp, Homo sapiens
cagatatggactccagtcatagtat

SEQ ID NO: 55262 - DNA, 25 bp, Homo sapiens
cagatatggactccagtcatagtac

SEQ ID NO: 55263 - DNA, 19 bp, Homo sapiens
tggctgagcatcgttattc

SEQ ID NO: 55264 - DNA, 21 bp, Homo sapiens
cctcctagagaagatctgcat

SEQ ID NO: 55265 - DNA, 21 bp, Homo sapiens
cctcctagagaagatctgcac

SEQ ID NO: 55266 - DNA, 18 bp, Homo sapiens
aaggcccctcttctgtct

SEQ ID NO: 55267 - DNA, 18 bp, Homo sapiens
tcctaacagaggcttggc

SEQ ID NO: 55268 - DNA, 19 bp, Homo sapiens
ttcctaacagaggcttgga

SEQ ID NO: 55269 - DNA, 19 bp, Homo sapiens
tgcagtgtcccctagaatg

SEQ ID NO: 55270 - DNA, 23 bp, Homo sapiens
aaaactgtatacgtgttttgtcc

SEQ ID NO: 55271 - DNA, 24 bp, Homo sapiens
aaaaactgtatacgtgttttgtca

SEQ ID NO: 55272 - DNA, 24 bp, Homo sapiens
accagcattcaagatactgtttac

SEQ ID NO: 55273 - DNA, 25 bp, Homo sapiens
tccaggtttagaatatcttcaatta

SEQ ID NO: 55274 - DNA, 24 bp, Homo sapiens
ccaggtttagaatatcttcaattg

SEQ ID NO: 55275 - DNA, 23 bp, Homo sapiens
tcagaagagctttccttgttaaa

SEQ ID NO: 55276 - DNA, 18 bp, Homo sapiens
aaatgttgtcaacgtcca

SEQ ID NO: 55277 - DNA, 17 bp, Homo sapiens
aatgttgtcaacgtccg

SEQ ID NO: 55278 - DNA, 19 bp, Homo sapiens
agtcactggcagcaatgat

SEQ ID NO: 55279 - DNA, 23 bp, Homo sapiens
gaagctttgtaggaaattgttta

SEQ ID NO: 55280 - DNA, 23 bp, Homo sapiens
gaagctttgtaggaaattgtttt

SEQ ID NO: 55281 - DNA, 25 bp, Homo sapiens
cacagttccagatcattattgtaac

SEQ ID NO: 55282 - DNA, 22 bp, Homo sapiens
cacttgttcagagtgttttcaa

SEQ ID NO: 55283 - DNA, 22 bp, Homo sapiens
cacttgttcagagtgttttcac

SEQ ID NO: 55284 - DNA, 20 bp, Homo sapiens
gcttggtccttcaaaatcat

SEQ ID NO: 55285 - DNA, 22 bp, Homo sapiens
ggctatcattatttgcagttct

SEQ ID NO: 55286 - DNA, 21 bp, Homo sapiens
gctatcattatttgcagttcc

SEQ ID NO: 55287 - DNA, 23 bp, Homo sapiens
agtaccactgcagatgaacagta

SEQ ID NO: 55288 - DNA, 17 bp, Homo sapiens
aggcttcccaagacatc

SEQ ID NO: 55289 - DNA, 17 bp, Homo sapiens
aggcttcccaagacatt

SEQ ID NO: 55290 - DNA, 20 bp, Homo sapiens
tcggaatctctctgaacaca

SEQ ID NO: 55291 - DNA, 16 bp, Homo sapiens
ccaccttagccctggc

SEQ ID NO: 55292 - DNA, 17 bp, Homo sapiens
tccaccttagccctggt

SEQ ID NO: 55293 - DNA, 22 bp, Homo sapiens
aagttcctggtagcttttcaga

SEQ ID NO: 55294 - DNA, 17 bp, Homo sapiens
cactcgcgtagcaggtg

SEQ ID NO: 55295 - DNA, 17 bp, Homo sapiens
cactcgcgtagcaggtt

SEQ ID NO: 55296 - DNA, 24 bp, Homo sapiens
caagtaccgagtaaggaagaagtt

SEQ ID NO: 55297 - DNA, 15 bp, Homo sapiens
tgggctccatcccat

SEQ ID NO: 55298 - DNA, 15 bp, Homo sapiens
tgggctccatcccac

SEQ ID NO: 55299 - DNA, 24 bp, Homo sapiens
ccaattctttttcttctttcagtt

SEQ ID NO: 55300 - DNA, 24 bp, Homo sapiens
atgtttttgtggtttgaagtttat

SEQ ID NO: 55301 - DNA, 23 bp, Homo sapiens
tgtttttgtggtttgaagtttag

SEQ ID NO: 55302 - DNA, 21 bp, Homo sapiens
acacaaggcaaccaaataaat

SEQ ID NO: 55303 - DNA, 15 bp, Homo sapiens
ccgctgcctgcacaa

SEQ ID NO: 55304 - DNA, 15 bp, Homo sapiens
ccgctgcctgcacag

SEQ ID NO: 55305 - DNA, 19 bp, Homo sapiens
cgtgcttgggagcagataa

SEQ ID NO: 55306 - DNA, 19 bp, Homo sapiens
gagaccaataacaacgacg

SEQ ID NO: 55307 - DNA, 19 bp, Homo sapiens
gagaccaataacaacgaca

SEQ ID NO: 55308 - DNA, 15 bp, Homo sapiens
tggcccacgctacct

SEQ ID NO: 55309 - DNA, 16 bp, Homo sapiens
acaatcaccacggtcc

SEQ ID NO: 55310 - DNA, 17 bp, Homo sapiens
cacaatcaccacggtct

SEQ ID NO: 55311 - DNA, 20 bp, Homo sapiens
ccttctgcatcagcatcttc

SEQ ID NO: 55312 - DNA, 16 bp, Homo sapiens
gagggctgctgggagt

SEQ ID NO: 55313 - DNA, 14 bp, Homo sapiens
gggctgctgggagg

SEQ ID NO: 55314 - DNA, 19 bp, Homo sapiens
gcgtgtctggaaaatgtga

SEQ ID NO: 55315 - DNA, 17 bp, Homo sapiens
ggtctcccactccatac

SEQ ID NO: 55316 - DNA, 17 bp, Homo sapiens
ggtctcccactccatat

SEQ ID NO: 55317 - DNA, 20 bp, Homo sapiens
gggcccattaactcacatac

SEQ ID NO: 55318 - DNA, 18 bp, Homo sapiens
aagaggccatttctcagg

SEQ ID NO: 55319 - DNA, 19 bp, Homo sapiens
gaagaggccatttctcaga

SEQ ID NO: 55320 - DNA, 24 bp, Homo sapiens
agtggaataagcatgtctgataag

SEQ ID NO: 55321 - DNA, 17 bp, Homo sapiens
gggacctggatcatcac

SEQ ID NO: 55322 - DNA, 17 bp, Homo sapiens
gggacctggatcatcat

SEQ ID NO: 55323 - DNA, 19 bp, Homo sapiens
gggaagaagggcgtctaag

SEQ ID NO: 55324 - DNA, 20 bp, Homo sapiens
aatttggtctgtcgtgaagg

SEQ ID NO: 55325 - DNA, 21 bp, Homo sapiens
caatttggtctgtcgtgaagt

SEQ ID NO: 55326 - DNA, 23 bp, Homo sapiens
gccaccaaagaaaaagaaataac

SEQ ID NO: 55327 - DNA, 15 bp, Homo sapiens
ataccgaccccgagc

SEQ ID NO: 55328 - DNA, 16 bp, Homo sapiens
tataccgaccccgagt

SEQ ID NO: 55329 - DNA, 18 bp, Homo sapiens
gccccgaggaaaatacag

SEQ ID NO: 55330 - DNA, 26 bp, Homo sapiens
atatttacttaaagctccactctttt

SEQ ID NO: 55331 - DNA, 27 bp, Homo sapiens
catatttacttaaagctccactcttta

SEQ ID NO: 55332 - DNA, 25 bp, Homo sapiens
ttgcttacccagtacatattaaatc

SEQ ID NO: 55333 - DNA, 16 bp, Homo sapiens
ggtcctgcttgatgcg

SEQ ID NO: 55334 - DNA, 17 bp, Homo sapiens
aggtcctgcttgatgcc

SEQ ID NO: 55335 - DNA, 19 bp, Homo sapiens
cgaccatggacattcacat

SEQ ID NO: 55336 - DNA, 19 bp, Homo sapiens
ctgcctcttctgcattaga

SEQ ID NO: 55337 - DNA, 18 bp, Homo sapiens
tgcctcttctgcattagg

SEQ ID NO: 55338 - DNA, 20 bp, Homo sapiens
ccttcactgcctgtttctct

SEQ ID NO: 55339 - DNA, 21 bp, Homo sapiens
aaaaagtggtctttgaacgat

SEQ ID NO: 55340 - DNA, 20 bp, Homo sapiens
aaaagtggtctttgaacgaa

SEQ ID NO: 55341 - DNA, 23 bp, Homo sapiens
aaagatctccagcatattgattc

SEQ ID NO: 55342 - DNA, 21 bp, Homo sapiens
gagccacctatgttctctacc

SEQ ID NO: 55343 - DNA, 22 bp, Homo sapiens
ggagccacctatgttctctact

SEQ ID NO: 55344 - DNA, 20 bp, Homo sapiens
tccctctttgctcattcatc

SEQ ID NO: 55345 - DNA, 16 bp, Homo sapiens
aggcaacatgaagccc

SEQ ID NO: 55346 - DNA, 17 bp, Homo sapiens
gaggcaacatgaagcct

SEQ ID NO: 55347 - DNA, 19 bp, Homo sapiens
cctccgcctggtaatactg

SEQ ID NO: 55348 - DNA, 18 bp, Homo sapiens
tctgtccaggtaccagca

SEQ ID NO: 55349 - DNA, 18 bp, Homo sapiens
tctgtccaggtaccagcc

SEQ ID NO: 55350 - DNA, 21 bp, Homo sapiens
caaggctgacgagttcactat

SEQ ID NO: 55351 - DNA, 17 bp, Homo sapiens
ggggctgtccagaaaac

SEQ ID NO: 55352 - DNA, 17 bp, Homo sapiens
ggggctgtccagaaaag

SEQ ID NO: 55353 - DNA, 22 bp, Homo sapiens
ggttacctgcattccagagtat

SEQ ID NO: 55354 - DNA, 20 bp, Homo sapiens
tcttctcttgcccaatcttt

SEQ ID NO: 55355 - DNA, 20 bp, Homo sapiens
tcttctcttgcccaatcttc

SEQ ID NO: 55356 - DNA, 21 bp, Homo sapiens
cgtaagaaggcaacaagttct

SEQ ID NO: 55357 - DNA, 19 bp, Homo sapiens
ccctgcctctgtctgactc

SEQ ID NO: 55358 - DNA, 19 bp, Homo sapiens
ccctgcctctgtctgacta

SEQ ID NO: 55359 - DNA, 18 bp, Homo sapiens
aagacaagcccaggttca

SEQ ID NO: 55360 - DNA, 22 bp, Homo sapiens
ccttccagactgtgagaaatag

SEQ ID NO: 55361 - DNA, 22 bp, Homo sapiens
ccttccagactgtgagaaataa

SEQ ID NO: 55362 - DNA, 24 bp, Homo sapiens
cctaatgcttgatcatcatcatac

SEQ ID NO: 55363 - DNA, 19 bp, Homo sapiens
caggcggaagtaggactct

SEQ ID NO: 55364 - DNA, 18 bp, Homo sapiens
aggcggaagtaggactcc

SEQ ID NO: 55365 - DNA, 19 bp, Homo sapiens
gcagctgaccatctgtctc

SEQ ID NO: 55366 - DNA, 18 bp, Homo sapiens
gctggaggagtcacttgc

SEQ ID NO: 55367 - DNA, 19 bp, Homo sapiens
tgctggaggagtcacttgt

SEQ ID NO: 55368 - DNA, 18 bp, Homo sapiens
gcaaaatgcccttcaatg

SEQ ID NO: 55369 - DNA, 19 bp, Homo sapiens
ggctggaatattctcggct

SEQ ID NO: 55370 - DNA, 18 bp, Homo sapiens
gctggaatattctcggcc

SEQ ID NO: 55371 - DNA, 27 bp, Homo sapiens
gaaagatatttggactactcaagtcta

SEQ ID NO: 55372 - DNA, 23 bp, Homo sapiens
ctttcaggcttctgtagattctt

SEQ ID NO: 55373 - DNA, 22 bp, Homo sapiens
tttcaggcttctgtagattctg

SEQ ID NO: 55374 - DNA, 25 bp, Homo sapiens
cactattgcctttattttgtttaca

SEQ ID NO: 55375 - DNA, 19 bp, Homo sapiens
gcataagtttccagttgcc

SEQ ID NO: 55376 - DNA, 20 bp, Homo sapiens
tgcataagtttccagttgct

SEQ ID NO: 55377 - DNA, 22 bp, Homo sapiens
tgtctggtttcaggattcatat

SEQ ID NO: 55378 - DNA, 21 bp, Homo sapiens
gataaaactgggctgcatata

SEQ ID NO: 55379 - DNA, 20 bp, Homo sapiens
ataaaactgggctgcatatc

SEQ ID NO: 55380 - DNA, 24 bp, Homo sapiens
aaagatgcacacattaaggttatc

SEQ ID NO: 55381 - DNA, 21 bp, Homo sapiens
tgaaacatcctcgtgtatacc

SEQ ID NO: 55382 - DNA, 23 bp, Homo sapiens
gttgaaacatcctcgtgtatact

SEQ ID NO: 55383 - DNA, 24 bp, Homo sapiens
tggatacaaatgaaatgaacatct

SEQ ID NO: 55384 - DNA, 18 bp, Homo sapiens
gtgagggccactagcttt

SEQ ID NO: 55385 - DNA, 18 bp, Homo sapiens
gtgagggccactagcttc

SEQ ID NO: 55386 - DNA, 24 bp, Homo sapiens
tggtgaagagtcatcagaataatc

SEQ ID NO: 55387 - DNA, 20 bp, Homo sapiens
ctcttcagattcagcagaac

SEQ ID NO: 55388 - DNA, 20 bp, Homo sapiens
ctcttcagattcagcagaat

SEQ ID NO: 55389 - DNA, 21 bp, Homo sapiens
ggtgctcagcaaagaaataac

SEQ ID NO: 55390 - DNA, 17 bp, Homo sapiens
tggacgtgggctttttt

SEQ ID NO: 55391 - DNA, 17 bp, Homo sapiens
tggacgtgggctttttc

SEQ ID NO: 55392 - DNA, 18 bp, Homo sapiens
gctgcagccctttttctc

SEQ ID NO: 55393 - DNA, 25 bp, Homo sapiens
atgacacaggtaatacagacttttc

SEQ ID NO: 55394 - DNA, 25 bp, Homo sapiens
atgacacaggtaatacagacttttt

SEQ ID NO: 55395 - DNA, 22 bp, Homo sapiens
tgaaataaggcactttgaacat

SEQ ID NO: 55396 - DNA, 18 bp, Homo sapiens
ctggtgtcagctctctgg

SEQ ID NO: 55397 - DNA, 20 bp, Homo sapiens
ctctggtgtcagctctctgt

SEQ ID NO: 55398 - DNA, 23 bp, Homo sapiens
tttgcattctgtgaagtgagtat

SEQ ID NO: 55399 - DNA, 24 bp, Homo sapiens
agtttatctgtgctccctaattaa

SEQ ID NO: 55400 - DNA, 24 bp, Homo sapiens
agtttatctgtgctccctaattag

SEQ ID NO: 55401 - DNA, 17 bp, Homo sapiens
cctgctccttgctgatg

SEQ ID NO: 55402 - DNA, 17 bp, Homo sapiens
ccattctcttggtgtcg

SEQ ID NO: 55403 - DNA, 19 bp, Homo sapiens
ttccattctcttggtgtca

SEQ ID NO: 55404 - DNA, 17 bp, Homo sapiens
cgcactgcgcacagtat

SEQ ID NO: 55405 - DNA, 17 bp, Homo sapiens
gcacttgggcttttgac

SEQ ID NO: 55406 - DNA, 18 bp, Homo sapiens
agcacttgggcttttgat

SEQ ID NO: 55407 - DNA, 24 bp, Homo sapiens
catataatggctcttgcatgtagt

SEQ ID NO: 55408 - DNA, 24 bp, Homo sapiens
caaatcagattcagagttaaacaa

SEQ ID NO: 55409 - DNA, 24 bp, Homo sapiens
caaatcagattcagagttaaacag

SEQ ID NO: 55410 - DNA, 26 bp, Homo sapiens
acgttatatggctctatctctacaac

SEQ ID NO: 55411 - DNA, 18 bp, Homo sapiens
ggaggtttgaccaactgc

SEQ ID NO: 55412 - DNA, 18 bp, Homo sapiens
ggaggtttgaccaactgg

SEQ ID NO: 55413 - DNA, 22 bp, Homo sapiens
tgccatgattcaagaaatagat

SEQ ID NO: 55414 - DNA, 21 bp, Homo sapiens
agtacccctttgcacagataa

SEQ ID NO: 55415 - DNA, 21 bp, Homo sapiens
agtacccctttgcacagatag

SEQ ID NO: 55416 - DNA, 24 bp, Homo sapiens
ctcaacacttgaattcatctatga

SEQ ID NO: 55417 - DNA, 19 bp, Homo sapiens
agggcctcatagaaagctc

SEQ ID NO: 55418 - DNA, 20 bp, Homo sapiens
cagggcctcatagaaagcta

SEQ ID NO: 55419 - DNA, 18 bp, Homo sapiens
ttcccttgcctggtatca

SEQ ID NO: 55420 - DNA, 23 bp, Homo sapiens
actatgactgtgtcttgggtaat

SEQ ID NO: 55421 - DNA, 23 bp, Homo sapiens
actatgactgtgtcttgggtaac

SEQ ID NO: 55422 - DNA, 21 bp, Homo sapiens
tcatttgcaaacttgttctca

SEQ ID NO: 55423 - DNA, 18 bp, Homo sapiens
catcagcctctagcttgg

SEQ ID NO: 55424 - DNA, 18 bp, Homo sapiens
catcagcctctagcttgc

SEQ ID NO: 55425 - DNA, 18 bp, Homo sapiens
catcccggccttctactt

SEQ ID NO: 55426 - DNA, 17 bp, Homo sapiens
ccacctccagcacctgt

SEQ ID NO: 55427 - DNA, 16 bp, Homo sapiens
cacctccagcacctgc

SEQ ID NO: 55428 - DNA, 22 bp, Homo sapiens
tcaaggaggaatactcgaagag

SEQ ID NO: 55429 - DNA, 23 bp, Homo sapiens
ttcagtttgacatcttcttttgt

SEQ ID NO: 55430 - DNA, 22 bp, Homo sapiens
tcagtttgacatcttcttttga

SEQ ID NO: 55431 - DNA, 24 bp, Homo sapiens
cattcttggtttttgtcttagaga

SEQ ID NO: 55432 - DNA, 15 bp, Homo sapiens
aaagcccccagcaaa

SEQ ID NO: 55433 - DNA, 15 bp, Homo sapiens
aaagcccccagcaag

SEQ ID NO: 55434 - DNA, 19 bp, Homo sapiens
gctgacaccttcccaagat

SEQ ID NO: 55435 - DNA, 22 bp, Homo sapiens
atatcgtgggtgagttcattta

SEQ ID NO: 55436 - DNA, 19 bp, Homo sapiens
tcgtgggtgagttcatttt

SEQ ID NO: 55437 - DNA, 20 bp, Homo sapiens
gggtgctgctgatgaaatac

SEQ ID NO: 55438 - DNA, 17 bp, Homo sapiens
cactagcccaggagacg

SEQ ID NO: 55439 - DNA, 18 bp, Homo sapiens
tcactagcccaggagaca

SEQ ID NO: 55440 - DNA, 22 bp, Homo sapiens
cagagatggatctgagagaaga

SEQ ID NO: 55441 - DNA, 15 bp, Homo sapiens
cggccgagatctccc

SEQ ID NO: 55442 - DNA, 15 bp, Homo sapiens
cggccgagatctccg

SEQ ID NO: 55443 - DNA, 18 bp, Homo sapiens
ccttcggccttcttgtca

SEQ ID NO: 55444 - DNA, 22 bp, Homo sapiens
ttgtcttttatcccagtcattc

SEQ ID NO: 55445 - DNA, 22 bp, Homo sapiens
ttgtcttttatcccagtcattt

SEQ ID NO: 55446 - DNA, 25 bp, Homo sapiens
ttaccagagaggactttagaatctc

SEQ ID NO: 55447 - DNA, 23 bp, Homo sapiens
caggtactataggaggattggac

SEQ ID NO: 55448 - DNA, 23 bp, Homo sapiens
caggtactataggaggattggag

SEQ ID NO: 55449 - DNA, 21 bp, Homo sapiens
tcattcagccttttgtcttct

SEQ ID NO: 55450 - DNA, 16 bp, Homo sapiens
gggtgtgcagggttgt

SEQ ID NO: 55451 - DNA, 15 bp, Homo sapiens
ggtgtgcagggttgg

SEQ ID NO: 55452 - DNA, 17 bp, Homo sapiens
ggcctccgcatcaatat

SEQ ID NO: 55453 - DNA, 23 bp, Homo sapiens
tcatctttcaaacgtattctcat

SEQ ID NO: 55454 - DNA, 23 bp, Homo sapiens
tcatctttcaaacgtattctcac

SEQ ID NO: 55455 - DNA, 24 bp, Homo sapiens
ctagctttgacaaagatgataacc

SEQ ID NO: 55456 - DNA, 19 bp, Homo sapiens
ctcacacacctagctctgg

SEQ ID NO: 55457 - DNA, 20 bp, Homo sapiens
gctcacacacctagctctgt

SEQ ID NO: 55458 - DNA, 22 bp, Homo sapiens
cacatctgtggacgagaactat

SEQ ID NO: 55459 - DNA, 21 bp, Homo sapiens
caaggcatctctgttaaccaa

SEQ ID NO: 55460 - DNA, 21 bp, Homo sapiens
caaggcatctctgttaaccat

SEQ ID NO: 55461 - DNA, 19 bp, Homo sapiens
ggctccagcctctgtagaa

SEQ ID NO: 55462 - DNA, 16 bp, Homo sapiens
gccgaggccaactagg

SEQ ID NO: 55463 - DNA, 16 bp, Homo sapiens
gccgaggccaactagc

SEQ ID NO: 55464 - DNA, 22 bp, Homo sapiens
gtgcaggagagaatcttgataa

SEQ ID NO: 55465 - DNA, 18 bp, Homo sapiens
ggagccatggactctcaa

SEQ ID NO: 55466 - DNA, 18 bp, Homo sapiens
ggagccatggactctcag

SEQ ID NO: 55467 - DNA, 17 bp, Homo sapiens
cctctccccgaaacaca

SEQ ID NO: 55468 - DNA, 17 bp, Homo sapiens
aggaacagcaagaaccg

SEQ ID NO: 55469 - DNA, 18 bp, Homo sapiens
caggaacagcaagaacca

SEQ ID NO: 55470 - DNA, 17 bp, Homo sapiens
caggagcctgcactctg

SEQ ID NO: 55471 - DNA, 15 bp, Homo sapiens
agtgcaggctcccaa

SEQ ID NO: 55472 - DNA, 15 bp, Homo sapiens
agtgcaggctcccag

SEQ ID NO: 55473 - DNA, 21 bp, Homo sapiens
tgaatccgaagtttgaagtct

SEQ ID NO: 55474 - DNA, 19 bp, Homo sapiens
agaatccttgctgctttca

SEQ ID NO: 55475 - DNA, 20 bp, Homo sapiens
aagaatccttgctgctttct

SEQ ID NO: 55476 - DNA, 25 bp, Homo sapiens
tgaggactagtgaacatcaagtaga

SEQ ID NO: 55477 - DNA, 19 bp, Homo sapiens
cttctgtttggtgtctgga

SEQ ID NO: 55478 - DNA, 18 bp, Homo sapiens
ttctgtttggtgtctggg

SEQ ID NO: 55479 - DNA, 23 bp, Homo sapiens
cagatgaatgaacactgaagtgt

SEQ ID NO: 55480 - DNA, 18 bp, Homo sapiens
gggcactgaagatgatga

SEQ ID NO: 55481 - DNA, 18 bp, Homo sapiens
gggcactgaagatgatgc

SEQ ID NO: 55482 - DNA, 28 bp, Homo sapiens
caaaatcacacaaatctacatatatcac

SEQ ID NO: 55483 - DNA, 17 bp, Homo sapiens
gcccagataccccaaaa

SEQ ID NO: 55484 - DNA, 17 bp, Homo sapiens
gcccagataccccaaag

SEQ ID NO: 55485 - DNA, 16 bp, Homo sapiens
gcccagcctgcgtaga

SEQ ID NO: 55486 - DNA, 17 bp, Homo sapiens
ggtctgttccctggacg

SEQ ID NO: 55487 - DNA, 18 bp, Homo sapiens
tggtctgttccctggaca

SEQ ID NO: 55488 - DNA, 19 bp, Homo sapiens
tgcggtcacactgactgag

SEQ ID NO: 55489 - DNA, 25 bp, Homo sapiens
caatttgtataatctaaaggagcat

SEQ ID NO: 55490 - DNA, 25 bp, Homo sapiens
caatttgtataatctaaaggagcac

SEQ ID NO: 55491 - DNA, 16 bp, Homo sapiens
gggcccgccttatgta

SEQ ID NO: 55492 - DNA, 19 bp, Homo sapiens
gcttttcgggtgttgattc

SEQ ID NO: 55493 - DNA, 19 bp, Homo sapiens
gcttttcgggtgttgatta

SEQ ID NO: 55494 - DNA, 19 bp, Homo sapiens
ccaccgtgccgttagtaac

SEQ ID NO: 55495 - DNA, 18 bp, Homo sapiens
acgcactttctggatctc

SEQ ID NO: 55496 - DNA, 18 bp, Homo sapiens
acgcactttctggatctt

SEQ ID NO: 55497 - DNA, 19 bp, Homo sapiens
cctgtgtgcccaactgtat

SEQ ID NO: 55498 - DNA, 19 bp, Homo sapiens
cgccacaaacacatacctg

SEQ ID NO: 55499 - DNA, 19 bp, Homo sapiens
cgccacaaacacatacctt

SEQ ID NO: 55500 - DNA, 16 bp, Homo sapiens
ccgctgcttggaacag

SEQ ID NO: 55501 - DNA, 14 bp, Homo sapiens
cgggcgggtaaagc

SEQ ID NO: 55502 - DNA, 14 bp, Homo sapiens
cgggcgggtaaagg

SEQ ID NO: 55503 - DNA, 20 bp, Homo sapiens
gagtcgagagtgggagaaga
